United States Patent Application Publication US 2022/0259616 A1 - sequence listing, part 6

SEQ ID NO: 135625 - DNA, 20 bp, Artificial Sequence
  mmSKRIPTE0006404_Lif_4
  gRNA
ccttcctcaaatcgtagctg

SEQ ID NO: 135626 - DNA, 20 bp, Artificial Sequence
  mmSKRIPTE0006405_Lif_5
  gRNA
tctgtgcaacaagtaccgtg

SEQ ID NO: 135627 - DNA, 20 bp, Artificial Sequence
  mmSKRIPTE0006406_Lif_6
  gRNA
acattgttaaatgcaaaacg

SEQ ID NO: 135628 - DNA, 20 bp, Artificial Sequence
  mmSKRIPTE0006407_Lif_7
  gRNA
gcaagttggggtgagcggcg

SEQ ID NO: 135629 - DNA, 20 bp, Artificial Sequence
  mmSKRIPTE0006408_Lif_8
  gRNA
ggttctgcactggaaacacg

SEQ ID NO: 135630 - DNA, 20 bp, Artificial Sequence
  mmSKRIPTE0006409_Lif_9
  gRNA
aggagcctcataccatttcg

SEQ ID NO: 135631 - DNA, 20 bp, Artificial Sequence
  mmSKRIPTE0006410_Ighg1_1
  gRNA
gtgtttgtcccaataaggtg

SEQ ID NO: 135632 - DNA, 20 bp, Artificial Sequence
  mmSKRIPTE0006411_Ighg1_2
  gRNA
gtggagtgagtctactacac

SEQ ID NO: 135633 - DNA, 20 bp, Artificial Sequence
  mmSKRIPTE0006412_Ighg1_3
  gRNA
ttagcctgcctaaaccaacc

SEQ ID NO: 135634 - DNA, 20 bp, Artificial Sequence
  mmSKRIPTE0006413_Ighg1_4
  gRNA
cagatgagctacctatctag

SEQ ID NO: 135635 - DNA, 20 bp, Artificial Sequence
  mmSKRIPTE0006414_Ighg1_5
  gRNA
tggtcacagatgcaatacac

SEQ ID NO: 135636 - DNA, 20 bp, Artificial Sequence
  mmSKRIPTE0006415_Ighg1_6
  gRNA
ggtttatcgaagtgttaagg

SEQ ID NO: 135637 - DNA, 20 bp, Artificial Sequence
  mmSKRIPTE0006416_Ighg1_7
  gRNA
ttacatagcatgtaagactg

SEQ ID NO: 135638 - DNA, 20 bp, Artificial Sequence
  mmSKRIPTE0006417_Ighg1_8
  gRNA
ggcttacaaccacaatccct

SEQ ID NO: 135639 - DNA, 20 bp, Artificial Sequence
  mmSKRIPTE0006418_Ighg1_9
  gRNA
gtgactaaggaaaaacccat

SEQ ID NO: 135640 - DNA, 20 bp, Artificial Sequence
  mmSKRIPTE0006419_Ighv15-2_1
  gRNA
catttgaaatggcggcaaag

SEQ ID NO: 135641 - DNA, 20 bp, Artificial Sequence
  mmSKRIPTE0006420_Ighv15-2_2
  gRNA
tagactagagggtactaatg

SEQ ID NO: 135642 - DNA, 20 bp, Artificial Sequence
  mmSKRIPTE0006421_Ighv15-2_3
  gRNA
gacacctagagttaggcatg

SEQ ID NO: 135643 - DNA, 20 bp, Artificial Sequence
  mmSKRIPTE0006422_Ighv15-2_4
  gRNA
tgtgcacagaggttctaaca

SEQ ID NO: 135644 - DNA, 20 bp, Artificial Sequence
  mmSKRIPTE0006423_Ighv15-2_5
  gRNA
gctcaacagtctgacatccg

SEQ ID NO: 135645 - DNA, 20 bp, Artificial Sequence
  mmSKRIPTE0006424_Ighv15-2_6
  gRNA
aagcagttgctcaaagcctg

SEQ ID NO: 135646 - DNA, 20 bp, Artificial Sequence
  mmSKRIPTE0006425_Ighv15-2_7
  gRNA
aagcatgtcaaaaagtctga

SEQ ID NO: 135647 - DNA, 20 bp, Artificial Sequence
  mmSKRIPTE0006426_Ighv15-2_8
  gRNA
agactgttgtaggtgaacct

SEQ ID NO: 135648 - DNA, 20 bp, Artificial Sequence
  mmSKRIPTE0006427_Ighv15-2_9
  gRNA
aatatgtaaatcatggtttg

SEQ ID NO: 135649 - DNA, 20 bp, Artificial Sequence
  mmSKRIPTE0006428_Pik3r1_1
  gRNA
tccgtagtgtaagtagccca

SEQ ID NO: 135650 - DNA, 20 bp, Artificial Sequence
  mmSKRIPTE0006429_Pik3r1_2
  gRNA
ggaccttgtatggtgtacgt

SEQ ID NO: 135651 - DNA, 20 bp, Artificial Sequence
  mmSKRIPTE0006430_Pik3r1_3
  gRNA
gaaagcgttaacaagcacca

SEQ ID NO: 135652 - DNA, 20 bp, Artificial Sequence
  mmSKRIPTE0006431_Pik3r1_4
  gRNA
ctaaacccagatgcacgaag

SEQ ID NO: 135653 - DNA, 20 bp, Artificial Sequence
  mmSKRIPTE0006432_Pik3r1_5
  gRNA
tgagagcctacatgtcacgc

SEQ ID NO: 135654 - DNA, 20 bp, Artificial Sequence
  mmSKRIPTE0006433_Pik3r1_6
  gRNA
ctattgcgagggaagcgaga

SEQ ID NO: 135655 - DNA, 20 bp, Artificial Sequence
  mmSKRIPTE0006434_Pik3r1_7
  gRNA
agagccgcgtctgctcacgc

SEQ ID NO: 135656 - DNA, 20 bp, Artificial Sequence
  mmSKRIPTE0006435_Pik3r1_8
  gRNA
acccagtatatgcacaacag

SEQ ID NO: 135657 - DNA, 20 bp, Artificial Sequence
  mmSKRIPTE0006436_Pik3r1_9
  gRNA
gtcttccatagtccaaaccg

SEQ ID NO: 135658 - DNA, 20 bp, Artificial Sequence
  mmSKRIPTE0006437_Pnp_1
  gRNA
ggggcctgccaacatcacgt

SEQ ID NO: 135659 - DNA, 20 bp, Artificial Sequence
  mmSKRIPTE0006438_Pnp_2
  gRNA
tgactcagacagtgtcgccg

SEQ ID NO: 135660 - DNA, 20 bp, Artificial Sequence
  mmSKRIPTE0006439_Pnp_3
  gRNA
agcattccactcccggatcg

SEQ ID NO: 135661 - DNA, 20 bp, Artificial Sequence
  mmSKRIPTE0006440_Pnp_4
  gRNA
aatgaaggcgtcagtacctg

SEQ ID NO: 135662 - DNA, 20 bp, Artificial Sequence
  mmSKRIPTE0006441_Pnp_5
  gRNA
tagtgcactattcgctgggc

SEQ ID NO: 135663 - DNA, 20 bp, Artificial Sequence
  mmSKRIPTE0006442_Pnp_6
  gRNA
atggagtaaatggagaacgt

SEQ ID NO: 135664 - DNA, 20 bp, Artificial Sequence
  mmSKRIPTE0006443_Pnp_7
  gRNA
ctagtaaggctacctgagag

SEQ ID NO: 135665 - DNA, 20 bp, Artificial Sequence
  mmSKRIPTE0006444_Pnp_8
  gRNA
catggagaacgagtaagtgc

SEQ ID NO: 135666 - DNA, 20 bp, Artificial Sequence
  mmSKRIPTE0006445_Pnp_9
  gRNA
atcctgccctttccgctcca

SEQ ID NO: 135667 - DNA, 20 bp, Artificial Sequence
  mmSKRIPTE0006446_Ticam1_1
  gRNA
tccctgaagacgatagagtg

SEQ ID NO: 135668 - DNA, 20 bp, Artificial Sequence
  mmSKRIPTE0006447_Ticam1_2
  gRNA
aagatgccatcgatcactcg

SEQ ID NO: 135669 - DNA, 20 bp, Artificial Sequence
  mmSKRIPTE0006448_Ticam1_3
  gRNA
tctggaacgctaatttcgtg

SEQ ID NO: 135670 - DNA, 20 bp, Artificial Sequence
  mmSKRIPTE0006449_Ticam1_4
  gRNA
aacccagggccttcgctccg

SEQ ID NO: 135671 - DNA, 20 bp, Artificial Sequence
  mmSKRIPTE0006450_Ticam1_5
  gRNA
aagtttacgaggctgcgctg

SEQ ID NO: 135672 - DNA, 20 bp, Artificial Sequence
  mmSKRIPTE0006451_Ticam1_6
  gRNA
tgggcatggtgaataatgag

SEQ ID NO: 135673 - DNA, 20 bp, Artificial Sequence
  mmSKRIPTE0006452_Ticam1_7
  gRNA
ggaggcagagcggcaaaacg

SEQ ID NO: 135674 - DNA, 20 bp, Artificial Sequence
  mmSKRIPTE0006453_Ticam1_8
  gRNA
aagtcctgcctagttccacg

SEQ ID NO: 135675 - DNA, 20 bp, Artificial Sequence
  mmSKRIPTE0006454_Ticam1_9
  gRNA
tctggtgtgtcaatgggacg

SEQ ID NO: 135676 - DNA, 20 bp, Artificial Sequence
  mmSKRIPTE0006455_Hspa9_1
  gRNA
ccgttctccctactgacgtg

SEQ ID NO: 135677 - DNA, 20 bp, Artificial Sequence
  mmSKRIPTE0006456_Hspa9_2
  gRNA
gtaaagacttaggaacgcca

SEQ ID NO: 135678 - DNA, 20 bp, Artificial Sequence
  mmSKRIPTE0006457_Hspa9_3
  gRNA
aaggatatttagactcgatg

SEQ ID NO: 135679 - DNA, 20 bp, Artificial Sequence
  mmSKRIPTE0006458_Hspa9_4
  gRNA
aaccagtggtgactaagcag

SEQ ID NO: 135680 - DNA, 20 bp, Artificial Sequence
  mmSKRIPTE0006459_Hspa9_5
  gRNA
actgtaaatagaatgtcacg

SEQ ID NO: 135681 - DNA, 20 bp, Artificial Sequence
  mmSKRIPTE0006460_Hspa9_6
  gRNA
tctgctgaacctaagcatca

SEQ ID NO: 135682 - DNA, 20 bp, Artificial Sequence
  mmSKRIPTE0006461_Hspa9_7
  gRNA
tatgtacttaatgccagact

SEQ ID NO: 135683 - DNA, 20 bp, Artificial Sequence
  mmSKRIPTE0006462_Hspa9_8
  gRNA
tttcaacgattaatgctgag

SEQ ID NO: 135684 - DNA, 20 bp, Artificial Sequence
  mmSKRIPTE0006463_Hspa9_9
  gRNA
caacttgccataccttacca

SEQ ID NO: 135685 - DNA, 20 bp, Artificial Sequence
  mmSKRIPTE0006464_Hhex_1
  gRNA
gactgaaacaggtatcgaca

SEQ ID NO: 135686 - DNA, 20 bp, Artificial Sequence
  mmSKRIPTE0006465_Hhex_2
  gRNA
tgttgccatagcccacgggg

SEQ ID NO: 135687 - DNA, 20 bp, Artificial Sequence
  mmSKRIPTE0006466_Hhex_3
  gRNA
cgggtgttaggcctcgagtg

SEQ ID NO: 135688 - DNA, 20 bp, Artificial Sequence
  mmSKRIPTE0006467_Hhex_4
  gRNA
caggccgagtgtgaaatcag

SEQ ID NO: 135689 - DNA, 20 bp, Artificial Sequence
  mmSKRIPTE0006468_Hhex_5
  gRNA
acactgcgaacgatccaaag

SEQ ID NO: 135690 - DNA, 20 bp, Artificial Sequence
  mmSKRIPTE0006469_Hhex_6
  gRNA
gcggtagtggcttacagtag

SEQ ID NO: 135691 - DNA, 20 bp, Artificial Sequence
  mmSKRIPTE0006470_Hhex_7
  gRNA
cagaccaactggaaaattcg

SEQ ID NO: 135692 - DNA, 20 bp, Artificial Sequence
  mmSKRIPTE0006471_Hhex_8
  gRNA
taagtgcacctctaaagtcg

SEQ ID NO: 135693 - DNA, 20 bp, Artificial Sequence
  mmSKRIPTE0006472_Hhex_9
  gRNA
gcatgtatgtgataggaaca

SEQ ID NO: 135694 - DNA, 20 bp, Artificial Sequence
  mmSKRIPTE0006473_Ldb1_1
  gRNA
ccccacatcccgatccagca

SEQ ID NO: 135695 - DNA, 20 bp, Artificial Sequence
  mmSKRIPTE0006474_Ldb1_2
  gRNA
gaggtccccaaacataatcg

SEQ ID NO: 135696 - DNA, 20 bp, Artificial Sequence
  mmSKRIPTE0006475_Ldb1_3
  gRNA
aaaatgcttcggaagtagcg

SEQ ID NO: 135697 - DNA, 20 bp, Artificial Sequence
  mmSKRIPTE0006476_Ldb1_4
  gRNA
atcatcagagacttactcgg

SEQ ID NO: 135698 - DNA, 20 bp, Artificial Sequence
  mmSKRIPTE0006477_Ldb1_5
  gRNA
accagacagtggtaaactag

SEQ ID NO: 135699 - DNA, 20 bp, Artificial Sequence
  mmSKRIPTE0006478_Ldb1_6
  gRNA
tcgccgaaggagcccccgaa

SEQ ID NO: 135700 - DNA, 20 bp, Artificial Sequence
  mmSKRIPTE0006479_Ldb1_7
  gRNA
ctggttcaccatatacctcg

SEQ ID NO: 135701 - DNA, 20 bp, Artificial Sequence
  mmSKRIPTE0006480_Ldb1_8
  gRNA
cggcaaacccatgtttaccc

SEQ ID NO: 135702 - DNA, 20 bp, Artificial Sequence
  mmSKRIPTE0006481_Ldb1_9
  gRNA
gcggtttccccaaggaggcg

SEQ ID NO: 135703 - DNA, 20 bp, Artificial Sequence
  mmSKRIPTE0006482_Il1f9_1
  gRNA
cggaagccatcattacacct

SEQ ID NO: 135704 - DNA, 20 bp, Artificial Sequence
  mmSKRIPTE0006483_Il1f9_2
  gRNA
gtctcagtacatatgaactg

SEQ ID NO: 135705 - DNA, 20 bp, Artificial Sequence
  mmSKRIPTE0006484_Il1f9_3
  gRNA
ccaagcgcaataacgaccag

SEQ ID NO: 135706 - DNA, 20 bp, Artificial Sequence
  mmSKRIPTE0006485_Il1f9_4
  gRNA
gcaccagaacaagatcacga

SEQ ID NO: 135707 - DNA, 20 bp, Artificial Sequence
  mmSKRIPTE0006486_Il1f9_5
  gRNA
gcttcgtggaactgtcacaa

SEQ ID NO: 135708 - DNA, 20 bp, Artificial Sequence
  mmSKRIPTE0006487_Il1f9_6
  gRNA
ggagcatatactgattaccc

SEQ ID NO: 135709 - DNA, 20 bp, Artificial Sequence
  mmSKRIPTE0006488_Il1f9_7
  gRNA
catggtatgaatcaggccaa

SEQ ID NO: 135710 - DNA, 20 bp, Artificial Sequence
  mmSKRIPTE0006489_Il1f9_8
  gRNA
actctgggtacttgcatggg

SEQ ID NO: 135711 - DNA, 20 bp, Artificial Sequence
  mmSKRIPTE0006490_Il1f9_9
  gRNA
caaagtcggtgggattggag

SEQ ID NO: 135712 - DNA, 20 bp, Artificial Sequence
  mmSKRIPTE0006491_Il1rn_1
  gRNA
caaccctgaaagtgtcgcaa

SEQ ID NO: 135713 - DNA, 20 bp, Artificial Sequence
  mmSKRIPTE0006492_Il1rn_2
  gRNA
gttcctctgcacaacactag

SEQ ID NO: 135714 - DNA, 20 bp, Artificial Sequence
  mmSKRIPTE0006493_Il1rn_3
  gRNA
agctttgggatcgagcaaag

SEQ ID NO: 135715 - DNA, 20 bp, Artificial Sequence
  mmSKRIPTE0006494_Il1rn_4
  gRNA
acttggaagatatctctcgt

SEQ ID NO: 135716 - DNA, 20 bp, Artificial Sequence
  mmSKRIPTE0006495_Il1rn_5
  gRNA
aaatggtcaggtaattgccg

SEQ ID NO: 135717 - DNA, 20 bp, Artificial Sequence
  mmSKRIPTE0006496_Il1rn_6
  gRNA
gtgttcttgggcatccacgg

SEQ ID NO: 135718 - DNA, 20 bp, Artificial Sequence
  mmSKRIPTE0006497_Il1rn_7
  gRNA
tagaaggtgagtggataaca

SEQ ID NO: 135719 - DNA, 20 bp, Artificial Sequence
  mmSKRIPTE0006498_Il1rn_8
  gRNA
ttgttgataactcttaccaa

SEQ ID NO: 135720 - DNA, 20 bp, Artificial Sequence
  mmSKRIPTE0006499_Il1rn_9
  gRNA
gctgttcaaacattatcttg

SEQ ID NO: 135721 - DNA, 20 bp, Artificial Sequence
  mmSKRIPTE0006500_Itgav_1
  gRNA
gcggggcgagcacagtacct

SEQ ID NO: 135722 - DNA, 20 bp, Artificial Sequence
  mmSKRIPTE0006501_Itgav_2
  gRNA
gttgaaaacctgacacggtg

SEQ ID NO: 135723 - DNA, 20 bp, Artificial Sequence
  mmSKRIPTE0006502_Itgav_3
  gRNA
gacttcctctttcggcgggg

SEQ ID NO: 135724 - DNA, 20 bp, Artificial Sequence
  mmSKRIPTE0006503_Itgav_4
  gRNA
tctcaacaggaagatctacg

SEQ ID NO: 135725 - DNA, 20 bp, Artificial Sequence
  mmSKRIPTE0006504_Itgav_5
  gRNA
ctgtagtgagtctaaccccg

SEQ ID NO: 135726 - DNA, 20 bp, Artificial Sequence
  mmSKRIPTE0006505_Itgav_6
  gRNA
gtattagcttcaataagctg

SEQ ID NO: 135727 - DNA, 20 bp, Artificial Sequence
  mmSKRIPTE0006506_Itgav_7
  gRNA
gaccatattagcctgctatg

SEQ ID NO: 135728 - DNA, 20 bp, Artificial Sequence
  mmSKRIPTE0006507_Itgav_8
  gRNA
acatgtgaggaatattaacg

SEQ ID NO: 135729 - DNA, 20 bp, Artificial Sequence
  mmSKRIPTE0006508_Itgav_9
  gRNA
tcatggaccgaggttccgat

SEQ ID NO: 135730 - DNA, 20 bp, Artificial Sequence
  mmSKRIPTE0006509_Rbck1_1
  gRNA
gagggccctgtctatgaacg

SEQ ID NO: 135731 - DNA, 20 bp, Artificial Sequence
  mmSKRIPTE0006510_Rbck1_2
  gRNA
tattgtgcatcaccgcagca

SEQ ID NO: 135732 - DNA, 20 bp, Artificial Sequence
  mmSKRIPTE0006511_Rbck1_3
  gRNA
gcccatctaaaggtgcagtg

SEQ ID NO: 135733 - DNA, 20 bp, Artificial Sequence
  mmSKRIPTE0006512_Rbck1_4
  gRNA
agggtcgggtgtctagtgca

SEQ ID NO: 135734 - DNA, 20 bp, Artificial Sequence
  mmSKRIPTE0006513_Rbck1_5
  gRNA
gtccagagtaggaccgagag

SEQ ID NO: 135735 - DNA, 20 bp, Artificial Sequence
  mmSKRIPTE0006514_Rbck1_6
  gRNA
gctcgggaaagccgacgcag

SEQ ID NO: 135736 - DNA, 20 bp, Artificial Sequence
  mmSKRIPTE0006515_Rbck1_7
  gRNA
gggagccctctgtaacgaag

SEQ ID NO: 135737 - DNA, 20 bp, Artificial Sequence
  mmSKRIPTE0006516_Rbck1_8
  gRNA
aactgccactaagtcgacga

SEQ ID NO: 135738 - DNA, 20 bp, Artificial Sequence
  mmSKRIPTE0006517_Rbck1_9
  gRNA
agaccgtggaactgttgctg

SEQ ID NO: 135739 - DNA, 20 bp, Artificial Sequence
  mmSKRIPTE0006518_L3mbtl1_1
  gRNA
gagtgactatggttggtcag

SEQ ID NO: 135740 - DNA, 20 bp, Artificial Sequence
  mmSKRIPTE0006519_L3mbtl1_2
  gRNA
agagagtgggcgatcagcgt

SEQ ID NO: 135741 - DNA, 20 bp, Artificial Sequence
  mmSKRIPTE0006520_L3mbtl1_3
  gRNA
cctagagttcagttgccccg

SEQ ID NO: 135742 - DNA, 20 bp, Artificial Sequence
  mmSKRIPTE0006521_L3mbtl1_4
  gRNA
agcgcgcctcttcaaagacg

SEQ ID NO: 135743 - DNA, 20 bp, Artificial Sequence
  mmSKRIPTE0006522_L3mbtl1_5
  gRNA
gcatttaccaaagccccccg

SEQ ID NO: 135744 - DNA, 20 bp, Artificial Sequence
  mmSKRIPTE0006523_L3mbtl1_6
  gRNA
gtgcacgttgacctcccctg

SEQ ID NO: 135745 - DNA, 20 bp, Artificial Sequence
  mmSKRIPTE0006524_L3mbtl1_7
  gRNA
gttgggctcgccacccgatg

SEQ ID NO: 135746 - DNA, 20 bp, Artificial Sequence
  mmSKRIPTE0006525_L3mbtl1_8
  gRNA
ctcgccgtcaatcatctgag

SEQ ID NO: 135747 - DNA, 20 bp, Artificial Sequence
  mmSKRIPTE0006526_L3mbtl1_9
  gRNA
gtggtaaaatgagggccgcg

SEQ ID NO: 135748 - DNA, 20 bp, Artificial Sequence
  mmSKRIPTE0006527_Dtx1_1
  gRNA
tgccattcaagttcttcacg

SEQ ID NO: 135749 - DNA, 20 bp, Artificial Sequence
  mmSKRIPTE0006528_Dtx1_2
  gRNA
gtggccatccagacgctgcg

SEQ ID NO: 135750 - DNA, 20 bp, Artificial Sequence
  mmSKRIPTE0006529_Dtx1_3
  gRNA
tcagaccactgacggaatcg

SEQ ID NO: 135751 - DNA, 20 bp, Artificial Sequence
  mmSKRIPTE0006530_Dtx1_4
  gRNA
tgggtctcaaatgtccggag

SEQ ID NO: 135752 - DNA, 20 bp, Artificial Sequence
  mmSKRIPTE0006531_Dtx1_5
  gRNA
tcagtcgaccaggaccacag

SEQ ID NO: 135753 - DNA, 20 bp, Artificial Sequence
  mmSKRIPTE0006532_Dtx1_6
  gRNA
gacgcagtagtcctggcgcg

SEQ ID NO: 135754 - DNA, 20 bp, Artificial Sequence
  mmSKRIPTE0006533_Dtx1_7
  gRNA
gtcgttatgtccccgcccgg

SEQ ID NO: 135755 - DNA, 20 bp, Artificial Sequence
  mmSKRIPTE0006534_Dtx1_8
  gRNA
cctgagacacttagaccgag

SEQ ID NO: 135756 - DNA, 20 bp, Artificial Sequence
  mmSKRIPTE0006535_Dtx1_9
  gRNA
aacctgcaaagccatctacg

SEQ ID NO: 135757 - DNA, 20 bp, Artificial Sequence
  mmSKRIPTE0006536_Ppp4r2_1
  gRNA
ctgtttatacagatacacgt

SEQ ID NO: 135758 - DNA, 20 bp, Artificial Sequence
  mmSKRIPTE0006537_Ppp4r2_2
  gRNA
gtccaaattcgagacccctg

SEQ ID NO: 135759 - DNA, 20 bp, Artificial Sequence
  mmSKRIPTE0006538_Ppp4r2_3
  gRNA
gtaatattcatcaccgtgtg

SEQ ID NO: 135760 - DNA, 20 bp, Artificial Sequence
  mmSKRIPTE0006539_Ppp4r2_4
  gRNA
gcggctatgtgaattgctaa

SEQ ID NO: 135761 - DNA, 20 bp, Artificial Sequence
  mmSKRIPTE0006540_Ppp4r2_5
  gRNA
cggcgacagctacagcaggg

SEQ ID NO: 135762 - DNA, 20 bp, Artificial Sequence
  mmSKRIPTE0006541_Ppp4r2_6
  gRNA
tccatataagcattatagca

SEQ ID NO: 135763 - DNA, 20 bp, Artificial Sequence
  mmSKRIPTE0006542_Ppp4r2_7
  gRNA
gtgcattgtaaacatcactg

SEQ ID NO: 135764 - DNA, 20 bp, Artificial Sequence
  mmSKRIPTE0006543_Ppp4r2_8
  gRNA
tacaatataccgcttcacaa

SEQ ID NO: 135765 - DNA, 20 bp, Artificial Sequence
  mmSKRIPTE0006544_Ppp4r2_9
  gRNA
gcgcgaggacgacagctgtg

SEQ ID NO: 135766 - DNA, 20 bp, Artificial Sequence
  mmSKRIPTE0006545_Pparg_1
  gRNA
gcacccttgaaaaattcgga

SEQ ID NO: 135767 - DNA, 20 bp, Artificial Sequence
  mmSKRIPTE0006546_Pparg_2
  gRNA
gaacacgagtcacagtacca

SEQ ID NO: 135768 - DNA, 20 bp, Artificial Sequence
  mmSKRIPTE0006547_Pparg_3
  gRNA
ggaacacgttgtcagcgggt

SEQ ID NO: 135769 - DNA, 20 bp, Artificial Sequence
  mmSKRIPTE0006548_Pparg_4
  gRNA
ttaagcaggttcgtggagcg

SEQ ID NO: 135770 - DNA, 20 bp, Artificial Sequence
  mmSKRIPTE0006549_Pparg_5
  gRNA
agtcaccaaagggcttccgc

SEQ ID NO: 135771 - DNA, 20 bp, Artificial Sequence
  mmSKRIPTE0006550_Pparg_6
  gRNA
atctagaacttcaagcgtag

SEQ ID NO: 135772 - DNA, 20 bp, Artificial Sequence
  mmSKRIPTE0006551_Pparg_7
  gRNA
tctgtctgttcagcagaatg

SEQ ID NO: 135773 - DNA, 20 bp, Artificial Sequence
  mmSKRIPTE0006552_Pparg_8
  gRNA
aaggcagaaccagcgccggg

SEQ ID NO: 135774 - DNA, 20 bp, Artificial Sequence
  mmSKRIPTE0006553_Pparg_9
  gRNA
tggcatccgcccaaacctga

SEQ ID NO: 135775 - DNA, 20 bp, Artificial Sequence
  mmSKRIPTE0006554_Cd177_1
  gRNA
atgtccggttcactctcgca

SEQ ID NO: 135776 - DNA, 20 bp, Artificial Sequence
  mmSKRIPTE0006555_Cd177_2
  gRNA
gctcatagacgtaggtacgt

SEQ ID NO: 135777 - DNA, 20 bp, Artificial Sequence
  mmSKRIPTE0006556_Cd177_3
  gRNA
tggatcccatacctggacga

SEQ ID NO: 135778 - DNA, 20 bp, Artificial Sequence
  mmSKRIPTE0006557_Cd177_4
  gRNA
tggaggcgacagattcggtg

SEQ ID NO: 135779 - DNA, 20 bp, Artificial Sequence
  mmSKRIPTE0006558_Cd177_5
  gRNA
gaaaggctgcactaccgcaa

SEQ ID NO: 135780 - DNA, 20 bp, Artificial Sequence
  mmSKRIPTE0006559_Cd177_6
  gRNA
atggcgacacacacgggtgt

SEQ ID NO: 135781 - DNA, 20 bp, Artificial Sequence
  mmSKRIPTE0006560_Cd177_7
  gRNA
atacaaggtcccaatcgcct

SEQ ID NO: 135782 - DNA, 20 bp, Artificial Sequence
  mmSKRIPTE0006561_Cd177_8
  gRNA
acatgcaactcacctgacgg

SEQ ID NO: 135783 - DNA, 20 bp, Artificial Sequence
  mmSKRIPTE0006562_Cd177_9
  gRNA
tgtcaaagagtaaccccacg

SEQ ID NO: 135784 - DNA, 20 bp, Artificial Sequence
  mmSKRIPTE0006563_Pycard_1
  gRNA
tagccttgaacttagcaccg

SEQ ID NO: 135785 - DNA, 20 bp, Artificial Sequence
  mmSKRIPTE0006564_Pycard_2
  gRNA
ggtcaagctaaaaagcgaga

SEQ ID NO: 135786 - DNA, 20 bp, Artificial Sequence
  mmSKRIPTE0006565_Pycard_3
  gRNA
ctatgggcgcatcccacgcg

SEQ ID NO: 135787 - DNA, 20 bp, Artificial Sequence
  mmSKRIPTE0006566_Pycard_4
  gRNA
tctgttgataaagatccacc

SEQ ID NO: 135788 - DNA, 20 bp, Artificial Sequence
  mmSKRIPTE0006567_Pycard_5
  gRNA
gttgagggtagacgaacaag

SEQ ID NO: 135789 - DNA, 20 bp, Artificial Sequence
  mmSKRIPTE0006568_Pycard_6
  gRNA
ggaacagttaagcgccaaag

SEQ ID NO: 135790 - DNA, 20 bp, Artificial Sequence
  mmSKRIPTE0006569_Pycard_7
  gRNA
gcaagagtaaaaggtgaccg

SEQ ID NO: 135791 - DNA, 20 bp, Artificial Sequence
  mmSKRIPTE0006570_Pycard_8
  gRNA
tgggaactcctgtctagaca

SEQ ID NO: 135792 - DNA, 20 bp, Artificial Sequence
  mmSKRIPTE0006571_Pycard_9
  gRNA
gctaggctgaagaaactagg

SEQ ID NO: 135793 - DNA, 20 bp, Artificial Sequence
  mmSKRIPTE0006572_Klf1_1
  gRNA
gctcgcgagtcggagtacga

SEQ ID NO: 135794 - DNA, 20 bp, Artificial Sequence
  mmSKRIPTE0006573_Klf1_2
  gRNA
agaccgccaccactgcggga

SEQ ID NO: 135795 - DNA, 20 bp, Artificial Sequence
  mmSKRIPTE0006574_Klf1_3
  gRNA
cgacaacaatcctagcagat

SEQ ID NO: 135796 - DNA, 20 bp, Artificial Sequence
  mmSKRIPTE0006575_Klf1_4
  gRNA
cccctcccttcgttcactag

SEQ ID NO: 135797 - DNA, 20 bp, Artificial Sequence
  mmSKRIPTE0006576_Klf1_5
  gRNA
aggcaggcggcacatacgtg

SEQ ID NO: 135798 - DNA, 20 bp, Artificial Sequence
  mmSKRIPTE0006577_Klf1_6
  gRNA
tttgggcggcgcagttcccg

SEQ ID NO: 135799 - DNA, 20 bp, Artificial Sequence
  mmSKRIPTE0006578_Klf1_7
  gRNA
aaggggttaggggaaccgtg

SEQ ID NO: 135800 - DNA, 20 bp, Artificial Sequence
  mmSKRIPTE0006579_Klf1_8
  gRNA
ccagctctttcgcgggctcg

SEQ ID NO: 135801 - DNA, 20 bp, Artificial Sequence
  mmSKRIPTE0006580_Klf1_9
  gRNA
tcacgtgagtctgaaatcgg

SEQ ID NO: 135802 - DNA, 20 bp, Artificial Sequence
  mmSKRIPTE0006581_Zbtb16_1
  gRNA
tgtgtagacgcccgtccatg

SEQ ID NO: 135803 - DNA, 20 bp, Artificial Sequence
  mmSKRIPTE0006582_Zbtb16_2
  gRNA
gtgctcatatgtatgcggac

SEQ ID NO: 135804 - DNA, 20 bp, Artificial Sequence
  mmSKRIPTE0006583_Zbtb16_3
  gRNA
tatagctgcgcacgcctgcg

SEQ ID NO: 135805 - DNA, 20 bp, Artificial Sequence
  mmSKRIPTE0006584_Zbtb16_4
  gRNA
atggacttcagcacctacgg

SEQ ID NO: 135806 - DNA, 20 bp, Artificial Sequence
  mmSKRIPTE0006585_Zbtb16_5
  gRNA
gatggtacactggtatggcg

SEQ ID NO: 135807 - DNA, 20 bp, Artificial Sequence
  mmSKRIPTE0006586_Zbtb16_6
  gRNA
gtgggctggaccatcgaaca

SEQ ID NO: 135808 - DNA, 20 bp, Artificial Sequence
  mmSKRIPTE0006587_Zbtb16_7
  gRNA
acgcactacagggttcacac

SEQ ID NO: 135809 - DNA, 20 bp, Artificial Sequence
  mmSKRIPTE0006588_Zbtb16_8
  gRNA
atgccgtcttcagtgacgtc

SEQ ID NO: 135810 - DNA, 20 bp, Artificial Sequence
  mmSKRIPTE0006589_Zbtb16_9
  gRNA
agaaccccgcacgagcccag

SEQ ID NO: 135811 - DNA, 20 bp, Artificial Sequence
  mmSKRIPTE0006590_Sirt1_1
  gRNA
gttaggaccattactgccag

SEQ ID NO: 135812 - DNA, 20 bp, Artificial Sequence
  mmSKRIPTE0006591_Sirt1_2
  gRNA
gcttggaagatgatacggag

SEQ ID NO: 135813 - DNA, 20 bp, Artificial Sequence
  mmSKRIPTE0006592_Sirt1_3
  gRNA
gcctgaagcatacctatccg

SEQ ID NO: 135814 - DNA, 20 bp, Artificial Sequence
  mmSKRIPTE0006593_Sirt1_4
  gRNA
gacgtcacagtggctctcgt

SEQ ID NO: 135815 - DNA, 20 bp, Artificial Sequence
  mmSKRIPTE0006594_Sirt1_5
  gRNA
cggtatctatgctcgccttg

SEQ ID NO: 135816 - DNA, 20 bp, Artificial Sequence
  mmSKRIPTE0006595_Sirt1_6
  gRNA
aatgtgccgagtgctaacct

SEQ ID NO: 135817 - DNA, 20 bp, Artificial Sequence
  mmSKRIPTE0006596_Sirt1_7
  gRNA
aaggttctatgactactatg

SEQ ID NO: 135818 - DNA, 20 bp, Artificial Sequence
  mmSKRIPTE0006597_Sirt1_8
  gRNA
gctctagtgactggactccg

SEQ ID NO: 135819 - DNA, 20 bp, Artificial Sequence
  mmSKRIPTE0006598_Sirt1_9
  gRNA
ctgagtatacctcagcaccg

SEQ ID NO: 135820 - DNA, 20 bp, Artificial Sequence
  mmSKRIPTE0006599_Itgb2_1
  gRNA
atctccgtgagtttctgtcg

SEQ ID NO: 135821 - DNA, 20 bp, Artificial Sequence
  mmSKRIPTE0006600_Itgb2_2
  gRNA
cactttacttgcgaccaggt

SEQ ID NO: 135822 - DNA, 20 bp, Artificial Sequence
  mmSKRIPTE0006601_Itgb2_3
  gRNA
aatgtagccagactcacacc

SEQ ID NO: 135823 - DNA, 20 bp, Artificial Sequence
  mmSKRIPTE0006602_Itgb2_4
  gRNA
aagttgctgcatgtccggtg

SEQ ID NO: 135824 - DNA, 20 bp, Artificial Sequence
  mmSKRIPTE0006603_Itgb2_5
  gRNA
ctaacgtcccacgtgtaaag

SEQ ID NO: 135825 - DNA, 20 bp, Artificial Sequence
  mmSKRIPTE0006604_Itgb2_6
  gRNA
gcagtgggaacactcacgtg

SEQ ID NO: 135826 - DNA, 20 bp, Artificial Sequence
  mmSKRIPTE0006605_Itgb2_7
  gRNA
ttggctggcgcaatgtcacg

SEQ ID NO: 135827 - DNA, 20 bp, Artificial Sequence
  mmSKRIPTE0006606_Itgb2_8
  gRNA
ctccagtcagattctcggag

SEQ ID NO: 135828 - DNA, 20 bp, Artificial Sequence
  mmSKRIPTE0006607_Itgb2_9
  gRNA
cctgttctaagtcagcgccc

SEQ ID NO: 135829 - DNA, 20 bp, Artificial Sequence
  mmSKRIPTE0006608_Bdkrb2_1
  gRNA
tttgagaacctcgatctccg

SEQ ID NO: 135830 - DNA, 20 bp, Artificial Sequence
  mmSKRIPTE0006609_Bdkrb2_2
  gRNA
tcccgttaagagcagacccg

SEQ ID NO: 135831 - DNA, 20 bp, Artificial Sequence
  mmSKRIPTE0006610_Bdkrb2_3
  gRNA
agatcccctgacttacccaa

SEQ ID NO: 135832 - DNA, 20 bp, Artificial Sequence
  mmSKRIPTE0006611_Bdkrb2_4
  gRNA
gaaaaggtgagtttccggca

SEQ ID NO: 135833 - DNA, 20 bp, Artificial Sequence
  mmSKRIPTE0006612_Bdkrb2_5
  gRNA
ggcccagaaaggtaacccgc

SEQ ID NO: 135834 - DNA, 20 bp, Artificial Sequence
  mmSKRIPTE0006613_Bdkrb2_6
  gRNA
gacggccagcactagcacgg

SEQ ID NO: 135835 - DNA, 20 bp, Artificial Sequence
  mmSKRIPTE0006614_Bdkrb2_7
  gRNA
gatgactcccggcggcagtg

SEQ ID NO: 135836 - DNA, 20 bp, Artificial Sequence
  mmSKRIPTE0006615_Bdkrb2_8
  gRNA
ccactggtgtacgtgatcgt

SEQ ID NO: 135837 - DNA, 20 bp, Artificial Sequence
  mmSKRIPTE0006616_Bdkrb2_9
  gRNA
taggtctgagaaatgaagcg

SEQ ID NO: 135838 - DNA, 20 bp, Artificial Sequence
  mmSKRIPTE0006617_Trim38_1
  gRNA
acgatattacgacgtcacca

SEQ ID NO: 135839 - DNA, 20 bp, Artificial Sequence
  mmSKRIPTE0006618_Trim38_2
  gRNA
gaggtgtacatctaccactg

SEQ ID NO: 135840 - DNA, 20 bp, Artificial Sequence
  mmSKRIPTE0006619_Trim38_3
  gRNA
attagattggacacttgtag

SEQ ID NO: 135841 - DNA, 20 bp, Artificial Sequence
  mmSKRIPTE0006620_Trim38_4
  gRNA
tctgcgaagctttgacacca

SEQ ID NO: 135842 - DNA, 20 bp, Artificial Sequence
  mmSKRIPTE0006621_Trim38_5
  gRNA
gcatcaggatgatctccact

SEQ ID NO: 135843 - DNA, 20 bp, Artificial Sequence
  mmSKRIPTE0006622_Trim38_6
  gRNA
cagctggaagaaccttaagc

SEQ ID NO: 135844 - DNA, 20 bp, Artificial Sequence
  mmSKRIPTE0006623_Trim38_7
  gRNA
gacttacaaaagatgcccca

SEQ ID NO: 135845 - DNA, 20 bp, Artificial Sequence
  mmSKRIPTE0006624_Trim38_8
  gRNA
cccagaaattgctacaggtg

SEQ ID NO: 135846 - DNA, 20 bp, Artificial Sequence
  mmSKRIPTE0006625_Trim38_9
  gRNA
ggtctgtatgtagagccgac

SEQ ID NO: 135847 - DNA, 20 bp, Artificial Sequence
  mmSKRIPTE0006626_Srf_1
  gRNA
ggctgacgggcaagtcagcg

SEQ ID NO: 135848 - DNA, 20 bp, Artificial Sequence
  mmSKRIPTE0006627_Srf_2
  gRNA
cgtccccctagataagcggg

SEQ ID NO: 135849 - DNA, 20 bp, Artificial Sequence
  mmSKRIPTE0006628_Srf_3
  gRNA
acctgaaccggaccccgacg

SEQ ID NO: 135850 - DNA, 20 bp, Artificial Sequence
  mmSKRIPTE0006629_Srf_4
  gRNA
gtcagattccgacacctggt

SEQ ID NO: 135851 - DNA, 20 bp, Artificial Sequence
  mmSKRIPTE0006630_Srf_5
  gRNA
gagtgcgtgtggtatatccg

SEQ ID NO: 135852 - DNA, 20 bp, Artificial Sequence
  mmSKRIPTE0006631_Srf_6
  gRNA
ctgggcgaggacttaatgca

SEQ ID NO: 135853 - DNA, 20 bp, Artificial Sequence
  mmSKRIPTE0006632_Srf_7
  gRNA
cccctgggcaagtactagaa

SEQ ID NO: 135854 - DNA, 20 bp, Artificial Sequence
  mmSKRIPTE0006633_Srf_8
  gRNA
tgagtattagctgacccgat

SEQ ID NO: 135855 - DNA, 20 bp, Artificial Sequence
  mmSKRIPTE0006634_Srf_9
  gRNA
cacacacactgactggccga

SEQ ID NO: 135856 - DNA, 20 bp, Artificial Sequence
  mmSKRIPTE0006635_Tmem173_1
  gRNA
ttcagttccaaacgacactg

SEQ ID NO: 135857 - DNA, 20 bp, Artificial Sequence
  mmSKRIPTE0006636_Tmem173_2
  gRNA
tgctgggtatcaagtcatcg

SEQ ID NO: 135858 - DNA, 20 bp, Artificial Sequence
  mmSKRIPTE0006637_Tmem173_3
  gRNA
ctacagcacctgtctaggag

SEQ ID NO: 135859 - DNA, 20 bp, Artificial Sequence
  mmSKRIPTE0006638_Tmem173_4
  gRNA
gaaaggccaagtacttcccg

SEQ ID NO: 135860 - DNA, 20 bp, Artificial Sequence
  mmSKRIPTE0006639_Tmem173_5
  gRNA
ttaatagtttcagccttccg

SEQ ID NO: 135861 - DNA, 20 bp, Artificial Sequence
  mmSKRIPTE0006640_Tmem173_6
  gRNA
tgatcccccggaaatcggga

SEQ ID NO: 135862 - DNA, 20 bp, Artificial Sequence
  mmSKRIPTE0006641_Tmem173_7
  gRNA
gctaggacatgatagctatg

SEQ ID NO: 135863 - DNA, 20 bp, Artificial Sequence
  mmSKRIPTE0006642_Tmem173_8
  gRNA
tgccgcctcattgtctacca

SEQ ID NO: 135864 - DNA, 20 bp, Artificial Sequence
  mmSKRIPTE0006643_Tmem173_9
  gRNA
gtatgaccaggccagcccgt

SEQ ID NO: 135865 - DNA, 20 bp, Artificial Sequence
  mmSKRIPTE0006644_Cdkn2a_1
  gRNA
cctcgagttcgctttcctcg

SEQ ID NO: 135866 - DNA, 20 bp, Artificial Sequence
  mmSKRIPTE0006645_Cdkn2a_2
  gRNA
cacaagcggctatcgcgtgg

SEQ ID NO: 135867 - DNA, 20 bp, Artificial Sequence
  mmSKRIPTE0006646_Cdkn2a_3
  gRNA
cggtgcagattcgaactgcg

SEQ ID NO: 135868 - DNA, 20 bp, Artificial Sequence
  mmSKRIPTE0006647_Cdkn2a_4
  gRNA
ggtacgaccgaaagagttcg

SEQ ID NO: 135869 - DNA, 20 bp, Artificial Sequence
  mmSKRIPTE0006648_Cdkn2a_5
  gRNA
cgggactaggagcctttatg

SEQ ID NO: 135870 - DNA, 20 bp, Artificial Sequence
  mmSKRIPTE0006649_Cdkn2a_6
  gRNA
atgctagcgtgtctagcatg

SEQ ID NO: 135871 - DNA, 20 bp, Artificial Sequence
  mmSKRIPTE0006650_Cdkn2a_7
  gRNA
ttgaccaggagccagcgggt

SEQ ID NO: 135872 - DNA, 20 bp, Artificial Sequence
  mmSKRIPTE0006651_Cdkn2a_8
  gRNA
aagctccgctgttaactact

SEQ ID NO: 135873 - DNA, 20 bp, Artificial Sequence
  mmSKRIPTE0006652_Cdkn2a_9
  gRNA
ggaacgtcgcccagaccgac

SEQ ID NO: 135874 - DNA, 20 bp, Artificial Sequence
  mmSKRIPTE0006653_Tnfsf4_1
  gRNA
ttggaaagaagattaccccg

SEQ ID NO: 135875 - DNA, 20 bp, Artificial Sequence
  mmSKRIPTE0006654_Tnfsf4_2
  gRNA
actggtgcatcttaccggag

SEQ ID NO: 135876 - DNA, 20 bp, Artificial Sequence
  mmSKRIPTE0006655_Tnfsf4_3
  gRNA
tctattccaatgctgaacga

SEQ ID NO: 135877 - DNA, 20 bp, Artificial Sequence
  mmSKRIPTE0006656_Tnfsf4_4
  gRNA
acaactccctgttagcccgg

SEQ ID NO: 135878 - DNA, 20 bp, Artificial Sequence
  mmSKRIPTE0006657_Tnfsf4_5
  gRNA
ttcaagtcctgctttccacg

SEQ ID NO: 135879 - DNA, 20 bp, Artificial Sequence
  mmSKRIPTE0006658_Tnfsf4_6
  gRNA
gaggagatacagctgtggcg

SEQ ID NO: 135880 - DNA, 20 bp, Artificial Sequence
  mmSKRIPTE0006659_Tnfsf4_7
  gRNA
gaaaagctacgtctttcacc

SEQ ID NO: 135881 - DNA, 20 bp, Artificial Sequence
  mmSKRIPTE0006660_Tnfsf4_8
  gRNA
gattgaccttcatttccggg

SEQ ID NO: 135882 - DNA, 20 bp, Artificial Sequence
  mmSKRIPTE0006661_Tnfsf4_9
  gRNA
cctcagagtggaattcacag

SEQ ID NO: 135883 - DNA, 20 bp, Artificial Sequence
  mmSKRIPTE0006662_Fcgr2b_1
  gRNA
cggtgacactgacatgcgaa

SEQ ID NO: 135884 - DNA, 20 bp, Artificial Sequence
  mmSKRIPTE0006663_Fcgr2b_2
  gRNA
gtgggatgcgatatgctaag

SEQ ID NO: 135885 - DNA, 20 bp, Artificial Sequence
  mmSKRIPTE0006664_Fcgr2b_3
  gRNA
tgattccggatcgaggaaga

SEQ ID NO: 135886 - DNA, 20 bp, Artificial Sequence
  mmSKRIPTE0006665_Fcgr2b_4
  gRNA
acgggtagacagcgatgatg

SEQ ID NO: 135887 - DNA, 20 bp, Artificial Sequence
  mmSKRIPTE0006666_Fcgr2b_5
  gRNA
cccatagtgactaacccaag

SEQ ID NO: 135888 - DNA, 20 bp, Artificial Sequence
  mmSKRIPTE0006667_Fcgr2b_6
  gRNA
actacgagattggttcccaa

SEQ ID NO: 135889 - DNA, 20 bp, Artificial Sequence
  mmSKRIPTE0006668_Fcgr2b_7
  gRNA
gccagtctgaaagacacgaa

SEQ ID NO: 135890 - DNA, 20 bp, Artificial Sequence
  mmSKRIPTE0006669_Fcgr2b_8
  gRNA
atgccaagggagactaaatg

SEQ ID NO: 135891 - DNA, 20 bp, Artificial Sequence
  mmSKRIPTE0006670_Fcgr2b_9
  gRNA
aggtcccgacttacttagca

SEQ ID NO: 135892 - DNA, 20 bp, Artificial Sequence
  mmSKRIPTE0006671_Tlr5_1
  gRNA
gggctgccttgcatgacgaa

SEQ ID NO: 135893 - DNA, 20 bp, Artificial Sequence
  mmSKRIPTE0006672_Tlr5_2
  gRNA
cctcaagagcattctcatcg

SEQ ID NO: 135894 - DNA, 20 bp, Artificial Sequence
  mmSKRIPTE0006673_Tlr5_3
  gRNA
aggctatttatcacccacgc

SEQ ID NO: 135895 - DNA, 20 bp, Artificial Sequence
  mmSKRIPTE0006674_Tlr5_4
  gRNA
ctgcaactggacctttcgca

SEQ ID NO: 135896 - DNA, 20 bp, Artificial Sequence
  mmSKRIPTE0006675_Tlr5_5
  gRNA
ttgaaatctcacagcccggt

SEQ ID NO: 135897 - DNA, 20 bp, Artificial Sequence
  mmSKRIPTE0006676_Tlr5_6
  gRNA
aaggacccccagcggctgtg

SEQ ID NO: 135898 - DNA, 20 bp, Artificial Sequence
  mmSKRIPTE0006677_Tlr5_7
  gRNA
agttgaaagtcataaagacg

SEQ ID NO: 135899 - DNA, 20 bp, Artificial Sequence
  mmSKRIPTE0006678_Tlr5_8
  gRNA
ccgagcctcaggctgtgatg

SEQ ID NO: 135900 - DNA, 20 bp, Artificial Sequence
  mmSKRIPTE0006679_Tlr5_9
  gRNA
tacacccacctgctgaagtg

SEQ ID NO: 135901 - DNA, 20 bp, Artificial Sequence
  mmSKRIPTE0006680_Pik3r6_1
  gRNA
aactccaagcgggagacacg

SEQ ID NO: 135902 - DNA, 20 bp, Artificial Sequence
  mmSKRIPTE0006681_Pik3r6_2
  gRNA
aatgttcccaggactcctcg

SEQ ID NO: 135903 - DNA, 20 bp, Artificial Sequence
  mmSKRIPTE0006682_Pik3r6_3
  gRNA
ggccctgcccaatttagcat

SEQ ID NO: 135904 - DNA, 20 bp, Artificial Sequence
  mmSKRIPTE0006683_Pik3r6_4
  gRNA
ggccagacttgatcatcaca

SEQ ID NO: 135905 - DNA, 20 bp, Artificial Sequence
  mmSKRIPTE0006684_Pik3r6_5
  gRNA
gggttgtagacagagccaaa

SEQ ID NO: 135906 - DNA, 20 bp, Artificial Sequence
  mmSKRIPTE0006685_Pik3r6_6
  gRNA
ccaaggcgactgtagagtag

SEQ ID NO: 135907 - DNA, 20 bp, Artificial Sequence
  mmSKRIPTE0006686_Pik3r6_7
  gRNA
actatttgtacagcgccctg

SEQ ID NO: 135908 - DNA, 20 bp, Artificial Sequence
  mmSKRIPTE0006687_Pik3r6_8
  gRNA
accatgggtcgactcgaccc

SEQ ID NO: 135909 - DNA, 20 bp, Artificial Sequence
  mmSKRIPTE0006688_Pik3r6_9
  gRNA
ctatggcagccacaacggcg

SEQ ID NO: 135910 - DNA, 20 bp, Artificial Sequence
  mmSKRIPTE0006689_Tnfsf12_1
  gRNA
cggagtgaaccagcccacgt

SEQ ID NO: 135911 - DNA, 20 bp, Artificial Sequence
  mmSKRIPTE0006690_Tnfsf12_2
  gRNA
aaaagcgctctatacatgtg

SEQ ID NO: 135912 - DNA, 20 bp, Artificial Sequence
  mmSKRIPTE0006691_Tnfsf12_3
  gRNA
caagagtctgatgaggcgga

SEQ ID NO: 135913 - DNA, 20 bp, Artificial Sequence
  mmSKRIPTE0006692_Tnfsf12_4
  gRNA
agtctatagagactgcgagg

SEQ ID NO: 135914 - DNA, 20 bp, Artificial Sequence
  mmSKRIPTE0006693_Tnfsf12_5
  gRNA
acctggcacaaacggagctg

SEQ ID NO: 135915 - DNA, 20 bp, Artificial Sequence
  mmSKRIPTE0006694_Tnfsf12_6
  gRNA
cttcgtgtaccataagggca

SEQ ID NO: 135916 - DNA, 20 bp, Artificial Sequence
  mmSKRIPTE0006695_Tnfsf12_7
  gRNA
tgggctgcaatagctcggcg

SEQ ID NO: 135917 - DNA, 20 bp, Artificial Sequence
  mmSKRIPTE0006696_Tnfsf12_8
  gRNA
tgcttaaggattcaccacag

SEQ ID NO: 135918 - DNA, 20 bp, Artificial Sequence
  mmSKRIPTE0006697_Tnfsf12_9
  gRNA
gaagagcaaggatacgtctg

SEQ ID NO: 135919 - DNA, 20 bp, Artificial Sequence
  mmSKRIPTE0006698_Cebpe_1
  gRNA
tagggcaaatctaggaccgg

SEQ ID NO: 135920 - DNA, 20 bp, Artificial Sequence
  mmSKRIPTE0006699_Cebpe_2
  gRNA
cccagggagctacgacccca

SEQ ID NO: 135921 - DNA, 20 bp, Artificial Sequence
  mmSKRIPTE0006700_Cebpe_3
  gRNA
ctccgtcaccaactcctacg

SEQ ID NO: 135922 - DNA, 20 bp, Artificial Sequence
  mmSKRIPTE0006701_Cebpe_4
  gRNA
tgtgccacttggtactgcag

SEQ ID NO: 135923 - DNA, 20 bp, Artificial Sequence
  mmSKRIPTE0006702_Cebpe_5
  gRNA
acgtgaacgtaacaacatcg

SEQ ID NO: 135924 - DNA, 20 bp, Artificial Sequence
  mmSKRIPTE0006703_Cebpe_6
  gRNA
aaatactaacatgccgccca

SEQ ID NO: 135925 - DNA, 20 bp, Artificial Sequence
  mmSKRIPTE0006704_Cebpe_7
  gRNA
cttaccttgaggacacgcaa

SEQ ID NO: 135926 - DNA, 20 bp, Artificial Sequence
  mmSKRIPTE0006705_Cebpe_8
  gRNA
gcgttggcttcatggcaaag

SEQ ID NO: 135927 - DNA, 20 bp, Artificial Sequence
  mmSKRIPTE0006706_Cebpe_9
  gRNA
gtgtgtgagggataggcgaa

SEQ ID NO: 135928 - DNA, 20 bp, Artificial Sequence
  mmSKRIPTE0006707_Dnaja3_1
  gRNA
caactcctcggggtcaacag

SEQ ID NO: 135929 - DNA, 20 bp, Artificial Sequence
  mmSKRIPTE0006708_Dnaja3_2
  gRNA
cgtactgtagaactcccacg

SEQ ID NO: 135930 - DNA, 20 bp, Artificial Sequence
  mmSKRIPTE0006709_Dnaja3_3
  gRNA
tcaatgtcagcagcgcccgg

SEQ ID NO: 135931 - DNA, 20 bp, Artificial Sequence
  mmSKRIPTE0006710_Dnaja3_4
  gRNA
gggaataggccctatagctg

SEQ ID NO: 135932 - DNA, 20 bp, Artificial Sequence
  mmSKRIPTE0006711_Dnaja3_5
  gRNA
cacgcactgagccagtggtg

SEQ ID NO: 135933 - DNA, 20 bp, Artificial Sequence
  mmSKRIPTE0006712_Dnaja3_6
  gRNA
aatgacaataccatcggtga

SEQ ID NO: 135934 - DNA, 20 bp, Artificial Sequence
  mmSKRIPTE0006713_Dnaja3_7
  gRNA
gttgccactacgcccccctg

SEQ ID NO: 135935 - DNA, 20 bp, Artificial Sequence
  mmSKRIPTE0006714_Dnaja3_8
  gRNA
tgtgacggtaagagggcatg

SEQ ID NO: 135936 - DNA, 20 bp, Artificial Sequence
  mmSKRIPTE0006715_Dnaja3_9
  gRNA
tcacacccgccctcccaatg

SEQ ID NO: 135937 - DNA, 20 bp, Artificial Sequence
  mmSKRIPTE0006716_Igll1_1
  gRNA
gatcgacaagactctctggt

SEQ ID NO: 135938 - DNA, 20 bp, Artificial Sequence
  mmSKRIPTE0006717_Igll1_2
  gRNA
cgtgtaggtccacggactag

SEQ ID NO: 135939 - DNA, 20 bp, Artificial Sequence
  mmSKRIPTE0006718_Igll1_3
  gRNA
ctgttccagatcatcccacg

SEQ ID NO: 135940 - DNA, 20 bp, Artificial Sequence
  mmSKRIPTE0006719_Igll1_4
  gRNA
gctcaccaaacacactagtg

SEQ ID NO: 135941 - DNA, 20 bp, Artificial Sequence
  mmSKRIPTE0006720_Igll1_5
  gRNA
cactggccttgcaatgatcg

SEQ ID NO: 135942 - DNA, 20 bp, Artificial Sequence
  mmSKRIPTE0006721_Igll1_6
  gRNA
cctgctgtataagggcttcg

SEQ ID NO: 135943 - DNA, 20 bp, Artificial Sequence
  mmSKRIPTE0006722_Igll1_7
  gRNA
aaggacgcttccttatcacg

SEQ ID NO: 135944 - DNA, 20 bp, Artificial Sequence
  mmSKRIPTE0006723_Igll1_8
  gRNA
acacctcagcatctaaaccg

SEQ ID NO: 135945 - DNA, 20 bp, Artificial Sequence
  mmSKRIPTE0006724_Igll1_9
  gRNA
cggcagctgtatctactgtg

SEQ ID NO: 135946 - DNA, 20 bp, Artificial Sequence
  mmSKRIPTE0006725_Tnfsf14_1
  gRNA
aaccaccggagacggcgctg

SEQ ID NO: 135947 - DNA, 20 bp, Artificial Sequence
  mmSKRIPTE0006726_Tnfsf14_2
  gRNA
cataccagtgagactcggag

SEQ ID NO: 135948 - DNA, 20 bp, Artificial Sequence
  mmSKRIPTE0006727_Tnfsf14_3
  gRNA
gcgcacatcccgctacccga

SEQ ID NO: 135949 - DNA, 20 bp, Artificial Sequence
  mmSKRIPTE0006728_Tnfsf14_4
  gRNA
ctggtgagatcgttgatctg

SEQ ID NO: 135950 - DNA, 20 bp, Artificial Sequence
  mmSKRIPTE0006729_Tnfsf14_5
  gRNA
agtcgtgtctcccataacag

SEQ ID NO: 135951 - DNA, 20 bp, Artificial Sequence
  mmSKRIPTE0006730_Tnfsf14_6
  gRNA
taggacctggtgccgtcacg

SEQ ID NO: 135952 - DNA, 20 bp, Artificial Sequence
  mmSKRIPTE0006731_Tnfsf14_7
  gRNA
tagaactgctggtcagtcgg

SEQ ID NO: 135953 - DNA, 20 bp, Artificial Sequence
  mmSKRIPTE0006732_Tnfsf14_8
  gRNA
gagtgtcatcaggaccatgt

SEQ ID NO: 135954 - DNA, 20 bp, Artificial Sequence
  mmSKRIPTE0006733_Tnfsf14_9
  gRNA
cagtgagagtgatcgaccgg

SEQ ID NO: 135955 - DNA, 20 bp, Artificial Sequence
  mmSKRIPTE0006734_Nfatc1_1
  gRNA
tctgtgaccaatacggacac

SEQ ID NO: 135956 - DNA, 20 bp, Artificial Sequence
  mmSKRIPTE0006735_Nfatc1_2
  gRNA
ttcggtcacactgacccgag

SEQ ID NO: 135957 - DNA, 20 bp, Artificial Sequence
  mmSKRIPTE0006736_Nfatc1_3
  gRNA
tgacgcttctacacagcgtg

SEQ ID NO: 135958 - DNA, 20 bp, Artificial Sequence
  mmSKRIPTE0006737_Nfatc1_4
  gRNA
ttacataaacaagcggctcg

SEQ ID NO: 135959 - DNA, 20 bp, Artificial Sequence
  mmSKRIPTE0006738_Nfatc1_5
  gRNA
gacaccttggactagactag

SEQ ID NO: 135960 - DNA, 20 bp, Artificial Sequence
  mmSKRIPTE0006739_Nfatc1_6
  gRNA
aggaacagctgagatacccg

SEQ ID NO: 135961 - DNA, 20 bp, Artificial Sequence
  mmSKRIPTE0006740_Nfatc1_7
  gRNA
accatgcttgaagtataggt

SEQ ID NO: 135962 - DNA, 20 bp, Artificial Sequence
  mmSKRIPTE0006741_Nfatc1_8
  gRNA
tgcgagccatgtaagccaag

SEQ ID NO: 135963 - DNA, 20 bp, Artificial Sequence
  mmSKRIPTE0006742_Nfatc1_9
  gRNA
tactgaaacagaccttcgag

SEQ ID NO: 135964 - DNA, 20 bp, Artificial Sequence
  mmSKRIPTE0006743_Hck_1
  gRNA
tgggatgcgcagtctacgaa

SEQ ID NO: 135965 - DNA, 20 bp, Artificial Sequence
  mmSKRIPTE0006744_Hck_2
  gRNA
cttcaaggggatcagccgga

SEQ ID NO: 135966 - DNA, 20 bp, Artificial Sequence
  mmSKRIPTE0006745_Hck_3
  gRNA
cgggctgcccacgaagcgaa

SEQ ID NO: 135967 - DNA, 20 bp, Artificial Sequence
  mmSKRIPTE0006746_Hck_4
  gRNA
acaagagtgagtcttgctcg

SEQ ID NO: 135968 - DNA, 20 bp, Artificial Sequence
  mmSKRIPTE0006747_Hck_5
  gRNA
tccatctggagggattctcg

SEQ ID NO: 135969 - DNA, 20 bp, Artificial Sequence
  mmSKRIPTE0006748_Hck_6
  gRNA
tggactggcacgaatcatcg

SEQ ID NO: 135970 - DNA, 20 bp, Artificial Sequence
  mmSKRIPTE0006749_Hck_7
  gRNA
gtgattcctctgtcgcccag

SEQ ID NO: 135971 - DNA, 20 bp, Artificial Sequence
  mmSKRIPTE0006750_Hck_8
  gRNA
ctgctggaagaaccgccccg

SEQ ID NO: 135972 - DNA, 20 bp, Artificial Sequence
  mmSKRIPTE0006751_Hck_9
  gRNA
gcactataagatccggacgc

SEQ ID NO: 135973 - DNA, 20 bp, Artificial Sequence
  mmSKRIPTE0006752_Cd40_1
  gRNA
aaggcccattacacccacgc

SEQ ID NO: 135974 - DNA, 20 bp, Artificial Sequence
  mmSKRIPTE0006753_Cd40_2
  gRNA
tactaaccgccgcttccagt

SEQ ID NO: 135975 - DNA, 20 bp, Artificial Sequence
  mmSKRIPTE0006754_Cd40_3
  gRNA
ttgaaagttagccaagacgc

SEQ ID NO: 135976 - DNA, 20 bp, Artificial Sequence
  mmSKRIPTE0006755_Cd40_4
  gRNA
ctgcaccagcaaggattgcg

SEQ ID NO: 135977 - DNA, 20 bp, Artificial Sequence
  mmSKRIPTE0006756_Cd40_5
  gRNA
caatgccacttacacgaccc

SEQ ID NO: 135978 - DNA, 20 bp, Artificial Sequence
  mmSKRIPTE0006757_Cd40_6
  gRNA
cattgggagcacccgccagt

SEQ ID NO: 135979 - DNA, 20 bp, Artificial Sequence
  mmSKRIPTE0006758_Cd40_7
  gRNA
caggcgaattctcagcccag

SEQ ID NO: 135980 - DNA, 20 bp, Artificial Sequence
  mmSKRIPTE0006759_Cd40_8
  gRNA
gggttctgaattgtccaccc

SEQ ID NO: 135981 - DNA, 20 bp, Artificial Sequence
  mmSKRIPTE0006760_Cd40_9
  gRNA
tcttaccccctgcggctcga

SEQ ID NO: 135982 - DNA, 20 bp, Artificial Sequence
  mmSKRIPTE0006761_Rarres2_1
  gRNA
ggagacgatatgctcctgct

SEQ ID NO: 135983 - DNA, 20 bp, Artificial Sequence
  mmSKRIPTE0006762_Rarres2_2
  gRNA
tcatgggcaatataccacgt

SEQ ID NO: 135984 - DNA, 20 bp, Artificial Sequence
  mmSKRIPTE0006763_Rarres2_3
  gRNA
accagcaggattacttcccg

SEQ ID NO: 135985 - DNA, 20 bp, Artificial Sequence
  mmSKRIPTE0006764_Rarres2_4
  gRNA
gaggtgacatgcgagccaga

SEQ ID NO: 135986 - DNA, 20 bp, Artificial Sequence
  mmSKRIPTE0006765_Rarres2_5
  gRNA
cacttgtgaatacacccacg

SEQ ID NO: 135987 - DNA, 20 bp, Artificial Sequence
  mmSKRIPTE0006766_Rarres2_6
  gRNA
aagcgctgtgcccatcacca

SEQ ID NO: 135988 - DNA, 20 bp, Artificial Sequence
  mmSKRIPTE0006767_Rarres2_7
  gRNA
atagcagtagtgtcacccta

SEQ ID NO: 135989 - DNA, 20 bp, Artificial Sequence
  mmSKRIPTE0006768_Rarres2_8
  gRNA
ataagccctagacaggtaag

SEQ ID NO: 135990 - DNA, 20 bp, Artificial Sequence
  mmSKRIPTE0006769_Rarres2_9
  gRNA
acccccaggggaatgtcccg

SEQ ID NO: 135991 - DNA, 20 bp, Artificial Sequence
  mmSKRIPTE0006770_Nectin2_1
  gRNA
tgattacgcgaggtgcagag

SEQ ID NO: 135992 - DNA, 20 bp, Artificial Sequence
  mmSKRIPTE0006771_Nectin2_2
  gRNA
tcttcgtgtaccgatcggct

SEQ ID NO: 135993 - DNA, 20 bp, Artificial Sequence
  mmSKRIPTE0006772_Nectin2_3
  gRNA
aggaaacaggtgaaaacgcg

SEQ ID NO: 135994 - DNA, 20 bp, Artificial Sequence
  mmSKRIPTE0006773_Nectin2_4
  gRNA
actttacaaacgtctcaaca

SEQ ID NO: 135995 - DNA, 20 bp, Artificial Sequence
  mmSKRIPTE0006774_Nectin2_5
  gRNA
gtcggtgacaatctggacgg

SEQ ID NO: 135996 - DNA, 20 bp, Artificial Sequence
  mmSKRIPTE0006775_Nectin2_6
  gRNA
gggccgaacgaactgatccg

SEQ ID NO: 135997 - DNA, 20 bp, Artificial Sequence
  mmSKRIPTE0006776_Nectin2_7
  gRNA
tgccttgtcggaaaacctcg

SEQ ID NO: 135998 - DNA, 20 bp, Artificial Sequence
  mmSKRIPTE0006777_Nectin2_8
  gRNA
aaactgcccgccgagagatg

SEQ ID NO: 135999 - DNA, 20 bp, Artificial Sequence
  mmSKRIPTE0006778_Nectin2_9
  gRNA
agtgagaccctgtataacgt

SEQ ID NO: 136000 - DNA, 20 bp, Artificial Sequence
  mmSKRIPTE0006779_Nlrp9b_1
  gRNA
ttggagacatcgaattacag

SEQ ID NO: 136001 - DNA, 20 bp, Artificial Sequence
  mmSKRIPTE0006780_Nlrp9b_2
  gRNA
ctgaatccgataaggcagtg

SEQ ID NO: 136002 - DNA, 20 bp, Artificial Sequence
  mmSKRIPTE0006781_Nlrp9b_3
  gRNA
ccaagggtgataactatgca

SEQ ID NO: 136003 - DNA, 20 bp, Artificial Sequence
  mmSKRIPTE0006782_Nlrp9b_4
  gRNA
gagatgctcagcatgcagag

SEQ ID NO: 136004 - DNA, 20 bp, Artificial Sequence
  mmSKRIPTE0006783_Nlrp9b_5
  gRNA
tccttctttgataaccagag

SEQ ID NO: 136005 - DNA, 20 bp, Artificial Sequence
  mmSKRIPTE0006784_Nlrp9b_6
  gRNA
gtcaatcattgtccacaccc

SEQ ID NO: 136006 - DNA, 20 bp, Artificial Sequence
  mmSKRIPTE0006785_Nlrp9b_7
  gRNA
ctaggaaacatgtatgctcg

SEQ ID NO: 136007 - DNA, 20 bp, Artificial Sequence
  mmSKRIPTE0006786_Nlrp9b_8
  gRNA
aaacattgcaaagtgatgcg

SEQ ID NO: 136008 - DNA, 20 bp, Artificial Sequence
  mmSKRIPTE0006787_Nlrp9b_9
  gRNA
ctataagctagcagtccccc

SEQ ID NO: 136009 - DNA, 20 bp, Artificial Sequence
  mmSKRIPTE0006788_Ets1_1
  gRNA
aattcccgctgaccgccccg

SEQ ID NO: 136010 - DNA, 20 bp, Artificial Sequence
  mmSKRIPTE0006789_Ets1_2
  gRNA
ttacctccaggtaaactcgg

SEQ ID NO: 136011 - DNA, 20 bp, Artificial Sequence
  mmSKRIPTE0006790_Ets1_3
  gRNA
caaacttactctcatcccgc

SEQ ID NO: 136012 - DNA, 20 bp, Artificial Sequence
  mmSKRIPTE0006791_Ets1_4
  gRNA
cccacataccgtctatacca

SEQ ID NO: 136013 - DNA, 20 bp, Artificial Sequence
  mmSKRIPTE0006792_Ets1_5
  gRNA
cctggacaatgaaggaaccg

SEQ ID NO: 136014 - DNA, 20 bp, Artificial Sequence
  mmSKRIPTE0006793_Ets1_6
  gRNA
tctggttcagggaacgtacg

SEQ ID NO: 136015 - DNA, 20 bp, Artificial Sequence
  mmSKRIPTE0006794_Ets1_7
  gRNA
ctctcacacctacggtaaag

SEQ ID NO: 136016 - DNA, 20 bp, Artificial Sequence
  mmSKRIPTE0006795_Ets1_8
  gRNA
gaagccacaacaactcacca

SEQ ID NO: 136017 - DNA, 20 bp, Artificial Sequence
  mmSKRIPTE0006796_Ets1_9
  gRNA
gaactggtacagaattcggt

SEQ ID NO: 136018 - DNA, 20 bp, Artificial Sequence
  mmSKRIPTE0006797_Crtam_1
  gRNA
taactaaagcatgacctccg

SEQ ID NO: 136019 - DNA, 20 bp, Artificial Sequence
  mmSKRIPTE0006798_Crtam_2
  gRNA
ataaaagtggcccgtcaggt

SEQ ID NO: 136020 - DNA, 20 bp, Artificial Sequence
  mmSKRIPTE0006799_Crtam_3
  gRNA
gatgtggctaaagctcatct

SEQ ID NO: 136021 - DNA, 20 bp, Artificial Sequence
  mmSKRIPTE0006800_Crtam_4
  gRNA
agtggacagagaaccccgtg

SEQ ID NO: 136022 - DNA, 20 bp, Artificial Sequence
  mmSKRIPTE0006801_Crtam_5
  gRNA
cagatcaagatccaacaacg

SEQ ID NO: 136023 - DNA, 20 bp, Artificial Sequence
  mmSKRIPTE0006802_Crtam_6
  gRNA
ttcatgcaacgcttagactg

SEQ ID NO: 136024 - DNA, 20 bp, Artificial Sequence
  mmSKRIPTE0006803_Crtam_7
  gRNA
ttacttatgatgtgatggtg

SEQ ID NO: 136025 - DNA, 20 bp, Artificial Sequence
  mmSKRIPTE0006804_Crtam_8
  gRNA
tgggatgttacagcacgcag

SEQ ID NO: 136026 - DNA, 20 bp, Artificial Sequence
  mmSKRIPTE0006805_Crtam_9
  gRNA
agcatacaggactggcccgg

SEQ ID NO: 136027 - DNA, 20 bp, Artificial Sequence
  mmSKRIPTE0006806_Msn_1
  gRNA
atcaaagctccattaccctg

SEQ ID NO: 136028 - DNA, 20 bp, Artificial Sequence
  mmSKRIPTE0006807_Msn_2
  gRNA
gaataatccccactccacgg

SEQ ID NO: 136029 - DNA, 20 bp, Artificial Sequence
  mmSKRIPTE0006808_Msn_3
  gRNA
cgcttgttaatccgaagccg

SEQ ID NO: 136030 - DNA, 20 bp, Artificial Sequence
  mmSKRIPTE0006809_Msn_4
  gRNA
gctatactgaacgtttggca

SEQ ID NO: 136031 - DNA, 20 bp, Artificial Sequence
  mmSKRIPTE0006810_Msn_5
  gRNA
aggctgcgtgcaatcttgag

SEQ ID NO: 136032 - DNA, 20 bp, Artificial Sequence
  mmSKRIPTE0006811_Msn_6
  gRNA
gtgccgacaactagcgcggt

SEQ ID NO: 136033 - DNA, 20 bp, Artificial Sequence
  mmSKRIPTE0006812_Msn_7
  gRNA
gtgaagctcatggctatcag

SEQ ID NO: 136034 - DNA, 20 bp, Artificial Sequence
  mmSKRIPTE0006813_Msn_8
  gRNA
gggtgtacaaactagaagtg

SEQ ID NO: 136035 - DNA, 20 bp, Artificial Sequence
  mmSKRIPTE0006814_Msn_9
  gRNA
cacctacgttggccagatga

SEQ ID NO: 136036 - DNA, 20 bp, Artificial Sequence
  mmSKRIPTE0006815_Vegfd_1
  gRNA
gcaagcacttacaacccgta

SEQ ID NO: 136037 - DNA, 20 bp, Artificial Sequence
  mmSKRIPTE0006816_Vegfd_2
  gRNA
gagggtaacccatcatagtg

SEQ ID NO: 136038 - DNA, 20 bp, Artificial Sequence
  mmSKRIPTE0006817_Vegfd_3
  gRNA
ctagaaccttgagcgtaggg

SEQ ID NO: 136039 - DNA, 20 bp, Artificial Sequence
  mmSKRIPTE0006818_Vegfd_4
  gRNA
gcacggtagttatgcatcag

SEQ ID NO: 136040 - DNA, 20 bp, Artificial Sequence
  mmSKRIPTE0006819_Vegfd_5
  gRNA
taattgagtaaggatggcgg

SEQ ID NO: 136041 - DNA, 20 bp, Artificial Sequence
  mmSKRIPTE0006820_Vegfd_6
  gRNA
tacaggaataacgttcattg

SEQ ID NO: 136042 - DNA, 20 bp, Artificial Sequence
  mmSKRIPTE0006821_Vegfd_7
  gRNA
ggaggctgctgcaacgaaga

SEQ ID NO: 136043 - DNA, 20 bp, Artificial Sequence
  mmSKRIPTE0006822_Vegfd_8
  gRNA
ggaaacaactgcttagtcat

SEQ ID NO: 136044 - DNA, 20 bp, Artificial Sequence
  mmSKRIPTE0006823_Vegfd_9
  gRNA
tcttcatcaaacgtcatgtg

SEQ ID NO: 136045 - DNA, 20 bp, Artificial Sequence
  mmSKRIPTE0006824_Dusp10_1
  gRNA
atggtacagaggaaggtgcg

SEQ ID NO: 136046 - DNA, 20 bp, Artificial Sequence
  mmSKRIPTE0006825_Dusp10_2
  gRNA
ggcctgatgatccttgtcgt

SEQ ID NO: 136047 - DNA, 20 bp, Artificial Sequence
  mmSKRIPTE0006826_Dusp10_3
  gRNA
ccagctccaagagtgccggg

SEQ ID NO: 136048 - DNA, 20 bp, Artificial Sequence
  mmSKRIPTE0006827_Dusp10_4
  gRNA
gactcgaggactatgtgaag

SEQ ID NO: 136049 - DNA, 20 bp, Artificial Sequence
  mmSKRIPTE0006828_Dusp10_5
  gRNA
acgggtcactcagagccgga

SEQ ID NO: 136050 - DNA, 20 bp, Artificial Sequence
  mmSKRIPTE0006829_Dusp10_6
  gRNA
gagcatcctgctcattgccg

SEQ ID NO: 136051 - DNA, 20 bp, Artificial Sequence
  mmSKRIPTE0006830_Dusp10_7
  gRNA
ggtagcttgagtctaaacaa

SEQ ID NO: 136052 - DNA, 20 bp, Artificial Sequence
  mmSKRIPTE0006831_Dusp10_8
  gRNA
gacgcttacaaattcgtcaa

SEQ ID NO: 136053 - DNA, 20 bp, Artificial Sequence
  mmSKRIPTE0006832_Dusp10_9
  gRNA
gaatgacacatccccaaacg

SEQ ID NO: 136054 - DNA, 20 bp, Artificial Sequence
  mmSKRIPTE0006833_Raet1e_1
  gRNA
tcctggcacaaatcgttcag

SEQ ID NO: 136055 - DNA, 20 bp, Artificial Sequence
  mmSKRIPTE0006834_Raet1e_2
  gRNA
gtgtgacgtgaagtgctcag

SEQ ID NO: 136056 - DNA, 20 bp, Artificial Sequence
  mmSKRIPTE0006835_Raet1e_3
  gRNA
gaactcaccatccagcccgt

SEQ ID NO: 136057 - DNA, 20 bp, Artificial Sequence
  mmSKRIPTE0006836_Raet1e_4
  gRNA
gtcaaactgaggttgcaact

SEQ ID NO: 136058 - DNA, 20 bp, Artificial Sequence
  mmSKRIPTE0006837_Raet1e_5
  gRNA
ctctgaatattattaaaccc

SEQ ID NO: 136059 - DNA, 20 bp, Artificial Sequence
  mmSKRIPTE0006838_Raet1e_6
  gRNA
tctacacagagaatatgagc

SEQ ID NO: 136060 - DNA, 20 bp, Artificial Sequence
  mmSKRIPTE0006839_Raet1e_7
  gRNA
ggcagagacattgacaagag

SEQ ID NO: 136061 - DNA, 20 bp, Artificial Sequence
  mmSKRIPTE0006840_Raet1e_8
  gRNA
tttgcatttgcgatgtgaag

SEQ ID NO: 136062 - DNA, 20 bp, Artificial Sequence
  mmSKRIPTE0006841_Raet1e_9
  gRNA
ttcttagaagtagagtggct

SEQ ID NO: 136063 - DNA, 20 bp, Artificial Sequence
  mmSKRIPTE0006842_Irak3_1
  gRNA
acgttagatctggtctaacg

SEQ ID NO: 136064 - DNA, 20 bp, Artificial Sequence
  mmSKRIPTE0006843_Irak3_2
  gRNA
ttacagtgcacagtaagtcg

SEQ ID NO: 136065 - DNA, 20 bp, Artificial Sequence
  mmSKRIPTE0006844_Irak3_3
  gRNA
ttccatgaggaggtcccgct

SEQ ID NO: 136066 - DNA, 20 bp, Artificial Sequence
  mmSKRIPTE0006845_Irak3_4
  gRNA
gtcatgtcccaagacgggga

SEQ ID NO: 136067 - DNA, 20 bp, Artificial Sequence
  mmSKRIPTE0006846_Irak3_5
  gRNA
gtcaccgcctttcacaaccg

SEQ ID NO: 136068 - DNA, 20 bp, Artificial Sequence
  mmSKRIPTE0006847_Irak3_6
  gRNA
ggccaagttaagacccacga

SEQ ID NO: 136069 - DNA, 20 bp, Artificial Sequence
  mmSKRIPTE0006848_Irak3_7
  gRNA
aagtgagactttcagtacgt

SEQ ID NO: 136070 - DNA, 20 bp, Artificial Sequence
  mmSKRIPTE0006849_Irak3_8
  gRNA
ttgccacagatgacggcgca

SEQ ID NO: 136071 - DNA, 20 bp, Artificial Sequence
  mmSKRIPTE0006850_Irak3_9
  gRNA
tctgctgctctagattgggt

SEQ ID NO: 136072 - DNA, 20 bp, Artificial Sequence
  mmSKRIPTE0006851_Ighe_1
  gRNA
ccgtggctcatgatctgtcg

SEQ ID NO: 136073 - DNA, 20 bp, Artificial Sequence
  mmSKRIPTE0006852_Ighe_2
  gRNA
tgacaggtcgaactagggca

SEQ ID NO: 136074 - DNA, 20 bp, Artificial Sequence
  mmSKRIPTE0006853_Ighe_3
  gRNA
gtggtgcttagtgtaccact

SEQ ID NO: 136075 - DNA, 20 bp, Artificial Sequence
  mmSKRIPTE0006854_Ighe_4
  gRNA
tgggaacacatatacctcgg

SEQ ID NO: 136076 - DNA, 20 bp, Artificial Sequence
  mmSKRIPTE0006855_Ighe_5
  gRNA
gggagacccaacatactcgg

SEQ ID NO: 136077 - DNA, 20 bp, Artificial Sequence
  mmSKRIPTE0006856_Ighe_6
  gRNA
aggcgagtgtagacctacct

SEQ ID NO: 136078 - DNA, 20 bp, Artificial Sequence
  mmSKRIPTE0006857_Ighe_7
  gRNA
ggatgaatggagtagctcca

SEQ ID NO: 136079 - DNA, 20 bp, Artificial Sequence
  mmSKRIPTE0006858_Ighe_8
  gRNA
atgatggaggatgtgtcacg

SEQ ID NO: 136080 - DNA, 20 bp, Artificial Sequence
  mmSKRIPTE0006859_Ighe_9
  gRNA
cacctgccaagtgatccatg

SEQ ID NO: 136081 - DNA, 20 bp, Artificial Sequence
  mmSKRIPTE0006860_Irf4_1
  gRNA
aatgctgagatagcggaccc

SEQ ID NO: 136082 - DNA, 20 bp, Artificial Sequence
  mmSKRIPTE0006861_Irf4_2
  gRNA
cgcatcccgtggaaacacgc

SEQ ID NO: 136083 - DNA, 20 bp, Artificial Sequence
  mmSKRIPTE0006862_Irf4_3
  gRNA
cggtgactagactgatacga

SEQ ID NO: 136084 - DNA, 20 bp, Artificial Sequence
  mmSKRIPTE0006863_Irf4_4
  gRNA
cacccgtaaatcacacactg

SEQ ID NO: 136085 - DNA, 20 bp, Artificial Sequence
  mmSKRIPTE0006864_Irf4_5
  gRNA
gcagccttcagggctcgtcg

SEQ ID NO: 136086 - DNA, 20 bp, Artificial Sequence
  mmSKRIPTE0006865_Irf4_6
  gRNA
ctccaagttcatgacgcgtg

SEQ ID NO: 136087 - DNA, 20 bp, Artificial Sequence
  mmSKRIPTE0006866_Irf4_7
  gRNA
tgtagccgttgttagatcag

SEQ ID NO: 136088 - DNA, 20 bp, Artificial Sequence
  mmSKRIPTE0006867_Irf4_8
  gRNA
gcgtgtacagcccatactag

SEQ ID NO: 136089 - DNA, 20 bp, Artificial Sequence
  mmSKRIPTE0006868_Irf4_9
  gRNA
catgcctactccagaccccg

SEQ ID NO: 136090 - DNA, 20 bp, Artificial Sequence
  mmSKRIPTE0006869_Ubqln1_1
  gRNA
acatcaatgcagcaatcgaa

SEQ ID NO: 136091 - DNA, 20 bp, Artificial Sequence
  mmSKRIPTE0006870_Ubqln1_2
  gRNA
acatcgctgagagcgtgtcg

SEQ ID NO: 136092 - DNA, 20 bp, Artificial Sequence
  mmSKRIPTE0006871_Ubqln1_3
  gRNA
agcgagagtgtccttctccg

SEQ ID NO: 136093 - DNA, 20 bp, Artificial Sequence
  mmSKRIPTE0006872_Ubqln1_4
  gRNA
ccagtcttgtaatcaatgcg

SEQ ID NO: 136094 - DNA, 20 bp, Artificial Sequence
  mmSKRIPTE0006873_Ubqln1_5
  gRNA
gctcacgcagcggaacccag

SEQ ID NO: 136095 - DNA, 20 bp, Artificial Sequence
  mmSKRIPTE0006874_Ubqln1_6
  gRNA
tcatacctaagccgtagcat

SEQ ID NO: 136096 - DNA, 20 bp, Artificial Sequence
  mmSKRIPTE0006875_Ubqln1_7
  gRNA
gtggtatcctctccgcacgt

SEQ ID NO: 136097 - DNA, 20 bp, Artificial Sequence
  mmSKRIPTE0006876_Ubqln1_8
  gRNA
gcacaacttacctacgccaa

SEQ ID NO: 136098 - DNA, 20 bp, Artificial Sequence
  mmSKRIPTE0006877_Ubqln1_9
  gRNA
ggagagtccccgcgtccaca

SEQ ID NO: 136099 - DNA, 20 bp, Artificial Sequence
  mmSKRIPTE0006878_Sp1_1
  gRNA
caagtgtgctcggagatgtg

SEQ ID NO: 136100 - DNA, 20 bp, Artificial Sequence
  mmSKRIPTE0006879_Sp1_2
  gRNA
tcattcggacaccaaccgtg

SEQ ID NO: 136101 - DNA, 20 bp, Artificial Sequence
  mmSKRIPTE0006880_Sp1_3
  gRNA
gtgaaggtctgtccggacaa

SEQ ID NO: 136102 - DNA, 20 bp, Artificial Sequence
  mmSKRIPTE0006881_Sp1_4
  gRNA
gcacccaatagctggcctag

SEQ ID NO: 136103 - DNA, 20 bp, Artificial Sequence
  mmSKRIPTE0006882_Sp1_5
  gRNA
agtgccctaagcgtttcatg

SEQ ID NO: 136104 - DNA, 20 bp, Artificial Sequence
  mmSKRIPTE0006883_Sp1_6
  gRNA
tgagtccactccgagcctag

SEQ ID NO: 136105 - DNA, 20 bp, Artificial Sequence
  mmSKRIPTE0006884_Sp1_7
  gRNA
aaggcgggctgcctacccaa

SEQ ID NO: 136106 - DNA, 20 bp, Artificial Sequence
  mmSKRIPTE0006885_Sp1_8
  gRNA
acagccgcacaactttcaca

SEQ ID NO: 136107 - DNA, 20 bp, Artificial Sequence
  mmSKRIPTE0006886_Sp1_9
  gRNA
agaaggaaggggcggtttcg

SEQ ID NO: 136108 - DNA, 20 bp, Artificial Sequence
  mmSKRIPTE0006887_Ebi3_1
  gRNA
tacgctccaacagaggcgat

SEQ ID NO: 136109 - DNA, 20 bp, Artificial Sequence
  mmSKRIPTE0006888_Ebi3_2
  gRNA
tggagaacaggtgcacgtcg

SEQ ID NO: 136110 - DNA, 20 bp, Artificial Sequence
  mmSKRIPTE0006889_Ebi3_3
  gRNA
agtatgaatgaacggcagga

SEQ ID NO: 136111 - DNA, 20 bp, Artificial Sequence
  mmSKRIPTE0006890_Ebi3_4
  gRNA
gtcaagccggaccctccgga

SEQ ID NO: 136112 - DNA, 20 bp, Artificial Sequence
  mmSKRIPTE0006891_Ebi3_5
  gRNA
agtaacgctagataagcact

SEQ ID NO: 136113 - DNA, 20 bp, Artificial Sequence
  mmSKRIPTE0006892_Ebi3_6
  gRNA
gatgttgccaaggattggta

SEQ ID NO: 136114 - DNA, 20 bp, Artificial Sequence
  mmSKRIPTE0006893_Ebi3_7
  gRNA
acctgtttcagtgtaaccag

SEQ ID NO: 136115 - DNA, 20 bp, Artificial Sequence
  mmSKRIPTE0006894_Ebi3_8
  gRNA
ccctcaagtagacgacatca

SEQ ID NO: 136116 - DNA, 20 bp, Artificial Sequence
  mmSKRIPTE0006895_Ebi3_9
  gRNA
tcgctccatgggaacgcacg

SEQ ID NO: 136117 - DNA, 20 bp, Artificial Sequence
  mmSKRIPTE0006896_Eif2ak2_1
  gRNA
taagcgcgttaaatataaca

SEQ ID NO: 136118 - DNA, 20 bp, Artificial Sequence
  mmSKRIPTE0006897_Eif2ak2_2
  gRNA
tcagagaacgtgtttacggt

SEQ ID NO: 136119 - DNA, 20 bp, Artificial Sequence
  mmSKRIPTE0006898_Eif2ak2_3
  gRNA
gtaatgggatgcaagcacgc

SEQ ID NO: 136120 - DNA, 20 bp, Artificial Sequence
  mmSKRIPTE0006899_Eif2ak2_4
  gRNA
aagtttctggatccggacag

SEQ ID NO: 136121 - DNA, 20 bp, Artificial Sequence
  mmSKRIPTE0006900_Eif2ak2_5
  gRNA
gcacccgcgagaagtcaggt

SEQ ID NO: 136122 - DNA, 20 bp, Artificial Sequence
  mmSKRIPTE0006901_Eif2ak2_6
  gRNA
taactggcaacacataccgg

SEQ ID NO: 136123 - DNA, 20 bp, Artificial Sequence
  mmSKRIPTE0006902_Eif2ak2_7
  gRNA
taaggatggtcatacgattg

SEQ ID NO: 136124 - DNA, 20 bp, Artificial Sequence
  mmSKRIPTE0006903_Eif2ak2_8
  gRNA
gcccgggttcgaatcccgaa

SEQ ID NO: 136125 - DNA, 20 bp, Artificial Sequence
  mmSKRIPTE0006904_Eif2ak2_9
  gRNA
acagcatgagtgatacaagt

SEQ ID NO: 136126 - DNA, 20 bp, Artificial Sequence
  mmSKRIPTE0006905_Riok3_1
  gRNA
actagtacagcggtgacgga

SEQ ID NO: 136127 - DNA, 20 bp, Artificial Sequence
  mmSKRIPTE0006906_Riok3_2
  gRNA
tcagcgagtataacatgttg

SEQ ID NO: 136128 - DNA, 20 bp, Artificial Sequence
  mmSKRIPTE0006907_Riok3_3
  gRNA
actcaggttacgtttcctga

SEQ ID NO: 136129 - DNA, 20 bp, Artificial Sequence
  mmSKRIPTE0006908_Riok3_4
  gRNA
gacccagtaaggtgagcgag

SEQ ID NO: 136130 - DNA, 20 bp, Artificial Sequence
  mmSKRIPTE0006909_Riok3_5
  gRNA
acgtaagatcatccgcatgt

SEQ ID NO: 136131 - DNA, 20 bp, Artificial Sequence
  mmSKRIPTE0006910_Riok3_6
  gRNA
gagatccttagtatacaggg

SEQ ID NO: 136132 - DNA, 20 bp, Artificial Sequence
  mmSKRIPTE0006911_Riok3_7
  gRNA
cgagacgatccctacagacc

SEQ ID NO: 136133 - DNA, 20 bp, Artificial Sequence
  mmSKRIPTE0006912_Riok3_8
  gRNA
agaaaggtgctttcacaccg

SEQ ID NO: 136134 - DNA, 20 bp, Artificial Sequence
  mmSKRIPTE0006913_Riok3_9
  gRNA
gcttcgctcagggtgctccg

SEQ ID NO: 136135 - DNA, 20 bp, Artificial Sequence
  mmSKRIPTE0006914_Tlx1_1
  gRNA
gctcactcgtctaaaccgat

SEQ ID NO: 136136 - DNA, 20 bp, Artificial Sequence
  mmSKRIPTE0006915_Tlx1_2
  gRNA
ttggtggagtcgtcagacca

SEQ ID NO: 136137 - DNA, 20 bp, Artificial Sequence
  mmSKRIPTE0006916_Tlx1_3
  gRNA
ctggagaccacaaacaacga

SEQ ID NO: 136138 - DNA, 20 bp, Artificial Sequence
  mmSKRIPTE0006917_Tlx1_4
  gRNA
ccagtgcgctctgactcgcg

SEQ ID NO: 136139 - DNA, 20 bp, Artificial Sequence
  mmSKRIPTE0006918_Tlx1_5
  gRNA
tgaagcgtctcttaaaacac

SEQ ID NO: 136140 - DNA, 20 bp, Artificial Sequence
  mmSKRIPTE0006919_Tlx1_6
  gRNA
atacggcgtgttacagtgaa

SEQ ID NO: 136141 - DNA, 20 bp, Artificial Sequence
  mmSKRIPTE0006920_Tlx1_7
  gRNA
ggggccctaaccaaactttg

SEQ ID NO: 136142 - DNA, 20 bp, Artificial Sequence
  mmSKRIPTE0006921_Tlx1_8
  gRNA
aaatgagcagcgtctaccca

SEQ ID NO: 136143 - DNA, 20 bp, Artificial Sequence
  mmSKRIPTE0006922_Tlx1_9
  gRNA
aacttaggaaacgcacggag

SEQ ID NO: 136144 - DNA, 20 bp, Artificial Sequence
  mmSKRIPTE0006923_Wnt4_1
  gRNA
gtgatggactcagtgcgccg

SEQ ID NO: 136145 - DNA, 20 bp, Artificial Sequence
  mmSKRIPTE0006924_Wnt4_2
  gRNA
gcggtccccaagtatatgtg

SEQ ID NO: 136146 - DNA, 20 bp, Artificial Sequence
  mmSKRIPTE0006925_Wnt4_3
  gRNA
taccaaccccatcgacactg

SEQ ID NO: 136147 - DNA, 20 bp, Artificial Sequence
  mmSKRIPTE0006926_Wnt4_4
  gRNA
cctctcccggacgtccacaa

SEQ ID NO: 136148 - DNA, 20 bp, Artificial Sequence
  mmSKRIPTE0006927_Wnt4_5
  gRNA
tgctgaactaagtctaccag

SEQ ID NO: 136149 - DNA, 20 bp, Artificial Sequence
  mmSKRIPTE0006928_Wnt4_6
  gRNA
tcgtgcctagcacgccactg

SEQ ID NO: 136150 - DNA, 20 bp, Artificial Sequence
  mmSKRIPTE0006929_Wnt4_7
  gRNA
ggcttgaactgtgcattccg

SEQ ID NO: 136151 - DNA, 20 bp, Artificial Sequence
  mmSKRIPTE0006930_Wnt4_8
  gRNA
ccgagaacacggcgaagacg

SEQ ID NO: 136152 - DNA, 20 bp, Artificial Sequence
  mmSKRIPTE0006931_Wnt4_9
  gRNA
gcgtggccaacctggcggaa

SEQ ID NO: 136153 - DNA, 20 bp, Artificial Sequence
  mmSKRIPTE0006932_Tlr1_1
  gRNA
caaaccgatcgtagtgctga

SEQ ID NO: 136154 - DNA, 20 bp, Artificial Sequence
  mmSKRIPTE0006933_Tlr1_2
  gRNA
ttctaggtcctatacccatg

SEQ ID NO: 136155 - DNA, 20 bp, Artificial Sequence
  mmSKRIPTE0006934_Tlr1_3
  gRNA
tcaaaactctcatgtcacga

SEQ ID NO: 136156 - DNA, 20 bp, Artificial Sequence
  mmSKRIPTE0006935_Tlr1_4
  gRNA
tctctaaggtacagcgatgg

SEQ ID NO: 136157 - DNA, 20 bp, Artificial Sequence
  mmSKRIPTE0006936_Tlr1_5
  gRNA
tgaacaatgtggaaacaacg

SEQ ID NO: 136158 - DNA, 20 bp, Artificial Sequence
  mmSKRIPTE0006937_Tlr1_6
  gRNA
caagttcaaaactttcaggg

SEQ ID NO: 136159 - DNA, 20 bp, Artificial Sequence
  mmSKRIPTE0006938_Tlr1_7
  gRNA
aagtagttgtttgcaagggt

SEQ ID NO: 136160 - DNA, 20 bp, Artificial Sequence
  mmSKRIPTE0006939_Tlr1_8
  gRNA
tgaagaactcaggcgagcag

SEQ ID NO: 136161 - DNA, 20 bp, Artificial Sequence
  mmSKRIPTE0006940_Tlr1_9
  gRNA
agaataattgaacatcctga

SEQ ID NO: 136162 - DNA, 20 bp, Artificial Sequence
  mmSKRIPTE0006941_Pdgfra_1
  gRNA
aggaccgttcctgaaccgac

SEQ ID NO: 136163 - DNA, 20 bp, Artificial Sequence
  mmSKRIPTE0006942_Pdgfra_2
  gRNA
gtggcggcttatatgaacaa

SEQ ID NO: 136164 - DNA, 20 bp, Artificial Sequence
  mmSKRIPTE0006943_Pdgfra_3
  gRNA
tcccaaccaagtccctcgaa

SEQ ID NO: 136165 - DNA, 20 bp, Artificial Sequence
  mmSKRIPTE0006944_Pdgfra_4
  gRNA
gccagcgggtaagatcagcg

SEQ ID NO: 136166 - DNA, 20 bp, Artificial Sequence
  mmSKRIPTE0006945_Pdgfra_5
  gRNA
ggtgggagccgggatcacgt

SEQ ID NO: 136167 - DNA, 20 bp, Artificial Sequence
  mmSKRIPTE0006946_Pdgfra_6
  gRNA
atagtcctttctaaccaact

SEQ ID NO: 136168 - DNA, 20 bp, Artificial Sequence
  mmSKRIPTE0006947_Pdgfra_7
  gRNA
aaggaatcggtcatcccgag

SEQ ID NO: 136169 - DNA, 20 bp, Artificial Sequence
  mmSKRIPTE0006948_Pdgfra_8
  gRNA
agggacatccctccgcggaa

SEQ ID NO: 136170 - DNA, 20 bp, Artificial Sequence
  mmSKRIPTE0006949_Pdgfra_9
  gRNA
ctggtggcgatcttgtggcg

SEQ ID NO: 136171 - DNA, 20 bp, Artificial Sequence
  mmSKRIPTE0006950_Pkn1_1
  gRNA
tgagtccgatgagaactgcg

SEQ ID NO: 136172 - DNA, 20 bp, Artificial Sequence
  mmSKRIPTE0006951_Pkn1_2
  gRNA
gctccagatcatacttcacg

SEQ ID NO: 136173 - DNA, 20 bp, Artificial Sequence
  mmSKRIPTE0006952_Pkn1_3
  gRNA
caaccgcagtgacaccgcag

SEQ ID NO: 136174 - DNA, 20 bp, Artificial Sequence
  mmSKRIPTE0006953_Pkn1_4
  gRNA
aatcgctcaaaattgcacag

SEQ ID NO: 136175 - DNA, 20 bp, Artificial Sequence
  mmSKRIPTE0006954_Pkn1_5
  gRNA
ggcgatcagcatctgcacgg

SEQ ID NO: 136176 - DNA, 20 bp, Artificial Sequence
  mmSKRIPTE0006955_Pkn1_6
  gRNA
atgcttagtcgccaatcgag

SEQ ID NO: 136177 - DNA, 20 bp, Artificial Sequence
  mmSKRIPTE0006956_Pkn1_7
  gRNA
actgtgttgctctatgatag

SEQ ID NO: 136178 - DNA, 20 bp, Artificial Sequence
  mmSKRIPTE0006957_Pkn1_8
  gRNA
ctagcaactataggctcacg

SEQ ID NO: 136179 - DNA, 20 bp, Artificial Sequence
  mmSKRIPTE0006958_Pkn1_9
  gRNA
atgggaagtaagcctcacga

SEQ ID NO: 136180 - DNA, 20 bp, Artificial Sequence
  mmSKRIPTE0006959_Tgfbr2_1
  gRNA
gaagccgcatgaagtctgcg

SEQ ID NO: 136181 - DNA, 20 bp, Artificial Sequence
  mmSKRIPTE0006960_Tgfbr2_2
  gRNA
gaatccctacctagtatccg

SEQ ID NO: 136182 - DNA, 20 bp, Artificial Sequence
  mmSKRIPTE0006961_Tgfbr2_3
  gRNA
ggccagcgacaatggcggtg

SEQ ID NO: 136183 - DNA, 20 bp, Artificial Sequence
  mmSKRIPTE0006962_Tgfbr2_4
  gRNA
gggtagtatgaggtacccga

SEQ ID NO: 136184 - DNA, 20 bp, Artificial Sequence
  mmSKRIPTE0006963_Tgfbr2_5
  gRNA
aactttacccgggcgccgag

SEQ ID NO: 136185 - DNA, 20 bp, Artificial Sequence
  mmSKRIPTE0006964_Tgfbr2_6
  gRNA
acgaggagtactcctcgtag

SEQ ID NO: 136186 - DNA, 20 bp, Artificial Sequence
  mmSKRIPTE0006965_Tgfbr2_7
  gRNA
acctgcaggagtacctcacg

SEQ ID NO: 136187 - DNA, 20 bp, Artificial Sequence
  mmSKRIPTE0006966_Tgfbr2_8
  gRNA
agatcttgcccggatccccg

SEQ ID NO: 136188 - DNA, 20 bp, Artificial Sequence
  mmSKRIPTE0006967_Tgfbr2_9
  gRNA
tttcgacagtgtgttgatcg

SEQ ID NO: 136189 - DNA, 20 bp, Artificial Sequence
  mmSKRIPTE0006968_Ppbp_1
  gRNA
gacgattctcttgacgccag

SEQ ID NO: 136190 - DNA, 20 bp, Artificial Sequence
  mmSKRIPTE0006969_Ppbp_2
  gRNA
aagatctggaggttatgaag

SEQ ID NO: 136191 - DNA, 20 bp, Artificial Sequence
  mmSKRIPTE0006970_Ppbp_3
  gRNA
taaggggagccagcgcaaca

SEQ ID NO: 136192 - DNA, 20 bp, Artificial Sequence
  mmSKRIPTE0006971_Ppbp_4
  gRNA
acctacatcgtcctgcacca

SEQ ID NO: 136193 - DNA, 20 bp, Artificial Sequence
  mmSKRIPTE0006972_Ppbp_5
  gRNA
tcatgtgtctaagcggcttg

SEQ ID NO: 136194 - DNA, 20 bp, Artificial Sequence
  mmSKRIPTE0006973_Ppbp_6
  gRNA
ccaacccatatcaaccagac

SEQ ID NO: 136195 - DNA, 20 bp, Artificial Sequence
  mmSKRIPTE0006974_Ppbp_7
  gRNA
ctcttcggcagtataaaaag

SEQ ID NO: 136196 - DNA, 20 bp, Artificial Sequence
  mmSKRIPTE0006975_Ppbp_8
  gRNA
tctgtcagaacagatccatg

SEQ ID NO: 136197 - DNA, 20 bp, Artificial Sequence
  mmSKRIPTE0006976_Ppbp_9
  gRNA
ccagtagcaccaaaagtgtg

SEQ ID NO: 136198 - DNA, 20 bp, Artificial Sequence
  mmSKRIPTE0006977_A2m_1
  gRNA
taggcttattgacagcaacg

SEQ ID NO: 136199 - DNA, 20 bp, Artificial Sequence
  mmSKRIPTE0006978_A2m_2
  gRNA
tgtattgggtatactcgatg

SEQ ID NO: 136200 - DNA, 20 bp, Artificial Sequence
  mmSKRIPTE0006979_A2m_3
  gRNA
aagtccatatgccttaatcg

SEQ ID NO: 136201 - DNA, 20 bp, Artificial Sequence
  mmSKRIPTE0006980_A2m_4
  gRNA
tgatacgtacagaatcaggc

SEQ ID NO: 136202 - DNA, 20 bp, Artificial Sequence
  mmSKRIPTE0006981_A2m_5
  gRNA
tgttccctaccgattgacct

SEQ ID NO: 136203 - DNA, 20 bp, Artificial Sequence
  mmSKRIPTE0006982_A2m_6
  gRNA
ccggtttggattgtacagga

SEQ ID NO: 136204 - DNA, 20 bp, Artificial Sequence
  mmSKRIPTE0006983_A2m_7
  gRNA
tgatttcctagctaccccag

SEQ ID NO: 136205 - DNA, 20 bp, Artificial Sequence
  mmSKRIPTE0006984_A2m_8
  gRNA
cctctggaagcatcccgatg

SEQ ID NO: 136206 - DNA, 20 bp, Artificial Sequence
  mmSKRIPTE0006985_A2m_9
  gRNA
cagacgtatacttggtggag

SEQ ID NO: 136207 - DNA, 20 bp, Artificial Sequence
  mmSKRIPTE0006986_Il18bp_1
  gRNA
tctctctaaggttagcgaag

SEQ ID NO: 136208 - DNA, 20 bp, Artificial Sequence
  mmSKRIPTE0006987_Il18bp_2
  gRNA
aggcaatgtagaacctcaca

SEQ ID NO: 136209 - DNA, 20 bp, Artificial Sequence
  mmSKRIPTE0006988_Il18bp_3
  gRNA
gatactcctaggttctcacc

SEQ ID NO: 136210 - DNA, 20 bp, Artificial Sequence
  mmSKRIPTE0006989_Il18bp_4
  gRNA
gccaaagttatatctcaact

SEQ ID NO: 136211 - DNA, 20 bp, Artificial Sequence
  mmSKRIPTE0006990_Il18bp_5
  gRNA
actgttccgtccttgccttg

SEQ ID NO: 136212 - DNA, 20 bp, Artificial Sequence
  mmSKRIPTE0006991_Il18bp_6
  gRNA
ctacattcagcagagccgag

SEQ ID NO: 136213 - DNA, 20 bp, Artificial Sequence
  mmSKRIPTE0006992_Il18bp_7
  gRNA
gtgtaagcagagctatcact

SEQ ID NO: 136214 - DNA, 20 bp, Artificial Sequence
  mmSKRIPTE0006993_Il18bp_8
  gRNA
gggaggaacgctactacctg

SEQ ID NO: 136215 - DNA, 20 bp, Artificial Sequence
  mmSKRIPTE0006994_Il18bp_9
  gRNA
agttcctgaggacagtacca

SEQ ID NO: 136216 - DNA, 20 bp, Artificial Sequence
  mmSKRIPTE0006995_Efnb3_1
  gRNA
cgtgctttatcctcagatcg

SEQ ID NO: 136217 - DNA, 20 bp, Artificial Sequence
  mmSKRIPTE0006996_Efnb3_2
  gRNA
cccatgtcccccacgtagcg

SEQ ID NO: 136218 - DNA, 20 bp, Artificial Sequence
  mmSKRIPTE0006997_Efnb3_3
  gRNA
gagctaagaattgctgtccg

SEQ ID NO: 136219 - DNA, 20 bp, Artificial Sequence
  mmSKRIPTE0006998_Efnb3_4
  gRNA
cctctgtccgccaaaaacgg

SEQ ID NO: 136220 - DNA, 20 bp, Artificial Sequence
  mmSKRIPTE0006999_Efnb3_5
  gRNA
ctcggcgaataagaggtgag

SEQ ID NO: 136221 - DNA, 20 bp, Artificial Sequence
  mmSKRIPTE0007000_Efnb3_6
  gRNA
ggagggacaccataccaggt

SEQ ID NO: 136222 - DNA, 20 bp, Artificial Sequence
  mmSKRIPTE0007001_Efnb3_7
  gRNA
gtgactggggttccacagcg

SEQ ID NO: 136223 - DNA, 20 bp, Artificial Sequence
  mmSKRIPTE0007002_Efnb3_8
  gRNA
gagcattactgaatacccag

SEQ ID NO: 136224 - DNA, 20 bp, Artificial Sequence
  mmSKRIPTE0007003_Efnb3_9
  gRNA
atgaaggtgcttctgcgagt

SEQ ID NO: 136225 - DNA, 20 bp, Artificial Sequence
  mmSKRIPTE0007004_Ppp3cb_1
  gRNA
accgcgtcgtcaaaggtgag

SEQ ID NO: 136226 - DNA, 20 bp, Artificial Sequence
  mmSKRIPTE0007005_Ppp3cb_2
  gRNA
ctagctaggcgttgtcaccc

SEQ ID NO: 136227 - DNA, 20 bp, Artificial Sequence
  mmSKRIPTE0007006_Ppp3cb_3
  gRNA
ggacttgagcaaaattaccg

SEQ ID NO: 136228 - DNA, 20 bp, Artificial Sequence
  mmSKRIPTE0007007_Ppp3cb_4
  gRNA
cgtgcggctaaggggttccg

SEQ ID NO: 136229 - DNA, 20 bp, Artificial Sequence
  mmSKRIPTE0007008_Ppp3cb_5
  gRNA
ggagccggaagctcttaacg

SEQ ID NO: 136230 - DNA, 20 bp, Artificial Sequence
  mmSKRIPTE0007009_Ppp3cb_6
  gRNA
taatcaaataggatagccat

SEQ ID NO: 136231 - DNA, 20 bp, Artificial Sequence
  mmSKRIPTE0007010_Ppp3cb_7
  gRNA
ggacggcagaccttgcaaag

SEQ ID NO: 136232 - DNA, 20 bp, Artificial Sequence
  mmSKRIPTE0007011_Ppp3cb_8
  gRNA
cggcggctaccagagccaag

SEQ ID NO: 136233 - DNA, 20 bp, Artificial Sequence
  mmSKRIPTE0007012_Ppp3cb_9
  gRNA
gttgtgccccagtccatctg

SEQ ID NO: 136234 - DNA, 20 bp, Artificial Sequence
  mmSKRIPTE0007013_Mapk14_1
  gRNA
cgtggtccccgagataaagt

SEQ ID NO: 136235 - DNA, 20 bp, Artificial Sequence
  mmSKRIPTE0007014_Mapk14_2
  gRNA
cagcagacgcaactctcggt

SEQ ID NO: 136236 - DNA, 20 bp, Artificial Sequence
  mmSKRIPTE0007015_Mapk14_3
  gRNA
tgatgagatgacaggctacg

SEQ ID NO: 136237 - DNA, 20 bp, Artificial Sequence
  mmSKRIPTE0007016_Mapk14_4
  gRNA
agcagataatgcgtctgacg

SEQ ID NO: 136238 - DNA, 20 bp, Artificial Sequence
  mmSKRIPTE0007017_Mapk14_5
  gRNA
agttctttgcagttccagcg

SEQ ID NO: 136239 - DNA, 20 bp, Artificial Sequence
  mmSKRIPTE0007018_Mapk14_6
  gRNA
gttgggttcatgccgcatga

SEQ ID NO: 136240 - DNA, 20 bp, Artificial Sequence
  mmSKRIPTE0007019_Mapk14_7
  gRNA
agaggatacaagcaccgaca

SEQ ID NO: 136241 - DNA, 20 bp, Artificial Sequence
  mmSKRIPTE0007020_Mapk14_8
  gRNA
aactgatcaatatctaacgg

SEQ ID NO: 136242 - DNA, 20 bp, Artificial Sequence
  mmSKRIPTE0007021_Mapk14_9
  gRNA
tttgtatgcaatcctgccgg

SEQ ID NO: 136243 - DNA, 20 bp, Artificial Sequence
  mmSKRIPTE0007022_Ezh2_1
  gRNA
gtttcacgtaagtactccag

SEQ ID NO: 136244 - DNA, 20 bp, Artificial Sequence
  mmSKRIPTE0007023_Ezh2_2
  gRNA
ctcctacctaggaactaagt

SEQ ID NO: 136245 - DNA, 20 bp, Artificial Sequence
  mmSKRIPTE0007024_Ezh2_3
  gRNA
actgctggcaccgtctgatg

SEQ ID NO: 136246 - DNA, 20 bp, Artificial Sequence
  mmSKRIPTE0007025_Ezh2_4
  gRNA
agagtacattataggcaccg

SEQ ID NO: 136247 - DNA, 20 bp, Artificial Sequence
  mmSKRIPTE0007026_Ezh2_5
  gRNA
tatcagcactgtaacctaag

SEQ ID NO: 136248 - DNA, 20 bp, Artificial Sequence
  mmSKRIPTE0007027_Ezh2_6
  gRNA
gtttatttagtccagccggg

SEQ ID NO: 136249 - DNA, 20 bp, Artificial Sequence
  mmSKRIPTE0007028_Ezh2_7
  gRNA
taccggccaatcttagagtg

SEQ ID NO: 136250 - DNA, 20 bp, Artificial Sequence
  mmSKRIPTE0007029_Ezh2_8
  gRNA
ttaaacctcagaccacctga

SEQ ID NO: 136251 - DNA, 20 bp, Artificial Sequence
  mmSKRIPTE0007030_Ezh2_9
  gRNA
atcttcacatcagtacacgg

SEQ ID NO: 136252 - DNA, 20 bp, Artificial Sequence
  mmSKRIPTE0007031_Il17a_1
  gRNA
agatgttgcccgtcataaag

SEQ ID NO: 136253 - DNA, 20 bp, Artificial Sequence
  mmSKRIPTE0007032_Il17a_2
  gRNA
gcagcctaaacagagacccg

SEQ ID NO: 136254 - DNA, 20 bp, Artificial Sequence
  mmSKRIPTE0007033_Il17a_3
  gRNA
gaacggttgaggtagtctga

SEQ ID NO: 136255 - DNA, 20 bp, Artificial Sequence
  mmSKRIPTE0007034_Il17a_4
  gRNA
tgaccactataacaggttag

SEQ ID NO: 136256 - DNA, 20 bp, Artificial Sequence
  mmSKRIPTE0007035_Il17a_5
  gRNA
tggtcacttacgtcaagagt

SEQ ID NO: 136257 - DNA, 20 bp, Artificial Sequence
  mmSKRIPTE0007036_Il17a_6
  gRNA
gagaaaatgaggaatccggg

SEQ ID NO: 136258 - DNA, 20 bp, Artificial Sequence
  mmSKRIPTE0007037_Il17a_7
  gRNA
cttacgtactggagagtcca

SEQ ID NO: 136259 - DNA, 20 bp, Artificial Sequence
  mmSKRIPTE0007038_Il17a_8
  gRNA
taagtttgctgagaaacgtg

SEQ ID NO: 136260 - DNA, 20 bp, Artificial Sequence
  mmSKRIPTE0007039_Il17a_9
  gRNA
gtgcacttgtgcctcgtgtg

SEQ ID NO: 136261 - DNA, 20 bp, Artificial Sequence
  mmSKRIPTE0007040_Tnfsf11_1
  gRNA
ggaaatgtaacttacccgat

SEQ ID NO: 136262 - DNA, 20 bp, Artificial Sequence
  mmSKRIPTE0007041_Tnfsf11_2
  gRNA
tgaaggtactcgtagctaag

SEQ ID NO: 136263 - DNA, 20 bp, Artificial Sequence
  mmSKRIPTE0007042_Tnfsf11_3
  gRNA
tctgttaggatccatctacg

SEQ ID NO: 136264 - DNA, 20 bp, Artificial Sequence
  mmSKRIPTE0007043_Tnfsf11_4
  gRNA
gcctcgatcgtggtaccaag

SEQ ID NO: 136265 - DNA, 20 bp, Artificial Sequence
  mmSKRIPTE0007044_Tnfsf11_5
  gRNA
gctgtgagtttcatacaccg

SEQ ID NO: 136266 - DNA, 20 bp, Artificial Sequence
  mmSKRIPTE0007045_Tnfsf11_6
  gRNA
tctaacatgacgttaagcaa

SEQ ID NO: 136267 - DNA, 20 bp, Artificial Sequence
  mmSKRIPTE0007046_Tnfsf11_7
  gRNA
gtgtttgagctcctgccggt

SEQ ID NO: 136268 - DNA, 20 bp, Artificial Sequence
  mmSKRIPTE0007047_Tnfsf11_8
  gRNA
ttgactttacgacgtcaggg

SEQ ID NO: 136269 - DNA, 20 bp, Artificial Sequence
  mmSKRIPTE0007048_Tnfsf11_9
  gRNA
atcagctgaagatagtctgt

SEQ ID NO: 136270 - DNA, 20 bp, Artificial Sequence
  mmSKRIPTE0007049_Socs1_1
  gRNA
gcggaagtgagtgtcgccag

SEQ ID NO: 136271 - DNA, 20 bp, Artificial Sequence
  mmSKRIPTE0007050_Socs1_2
  gRNA
gtgctaccatcctactcgag

SEQ ID NO: 136272 - DNA, 20 bp, Artificial Sequence
  mmSKRIPTE0007051_Socs1_3
  gRNA
gctgtgtcgccagcgcatcg

SEQ ID NO: 136273 - DNA, 20 bp, Artificial Sequence
  mmSKRIPTE0007052_Socs1_4
  gRNA
accgaggctcaagctccggg

SEQ ID NO: 136274 - DNA, 20 bp, Artificial Sequence
  mmSKRIPTE0007053_Socs1_5
  gRNA
acctcgcagactgtatggca

SEQ ID NO: 136275 - DNA, 20 bp, Artificial Sequence
  mmSKRIPTE0007054_Socs1_6
  gRNA
cgtgccgctctcgctccttg

SEQ ID NO: 136276 - DNA, 20 bp, Artificial Sequence
  mmSKRIPTE0007055_Socs1_7
  gRNA
cacaagctgctacaaccagg

SEQ ID NO: 136277 - DNA, 20 bp, Artificial Sequence
  mmSKRIPTE0007056_Socs1_8
  gRNA
aagggttccgcatacaggaa

SEQ ID NO: 136278 - DNA, 20 bp, Artificial Sequence
  mmSKRIPTE0007057_Socs1_9
  gRNA
cgagctgctggagcactacg

SEQ ID NO: 136279 - DNA, 20 bp, Artificial Sequence
  mmSKRIPTE0007058_Cd320_1
  gRNA
aaggagccgtgaaacacgca

SEQ ID NO: 136280 - DNA, 20 bp, Artificial Sequence
  mmSKRIPTE0007059_Cd320_2
  gRNA
tggtctcagaacaggcctag

SEQ ID NO: 136281 - DNA, 20 bp, Artificial Sequence
  mmSKRIPTE0007060_Cd320_3
  gRNA
catttcttgagagcgtcctg

SEQ ID NO: 136282 - DNA, 20 bp, Artificial Sequence
  mmSKRIPTE0007061_Cd320_4
  gRNA
caaaagcggtgtagaaacgg

SEQ ID NO: 136283 - DNA, 20 bp, Artificial Sequence
  mmSKRIPTE0007062_Cd320_5
  gRNA
ggacagcgcaggaataaggg

SEQ ID NO: 136284 - DNA, 20 bp, Artificial Sequence
  mmSKRIPTE0007063_Cd320_6
  gRNA
ctcatattgctacgcctccg

SEQ ID NO: 136285 - DNA, 20 bp, Artificial Sequence
  mmSKRIPTE0007064_Cd320_7
  gRNA
gggcggcgcagccaatagtg

SEQ ID NO: 136286 - DNA, 20 bp, Artificial Sequence
  mmSKRIPTE0007065_Cd320_8
  gRNA
gcaaggcatcagtagctgag

SEQ ID NO: 136287 - DNA, 20 bp, Artificial Sequence
  mmSKRIPTE0007066_Cd320_9
  gRNA
acatacagcgggagtgtctg

SEQ ID NO: 136288 - DNA, 20 bp, Artificial Sequence
  mmSKRIPTE0007067_Trim8_1
  gRNA
gcataattcccgagccaccg

SEQ ID NO: 136289 - DNA, 20 bp, Artificial Sequence
  mmSKRIPTE0007068_Trim8_2
  gRNA
catataacaggccgcctccg

SEQ ID NO: 136290 - DNA, 20 bp, Artificial Sequence
  mmSKRIPTE0007069_Trim8_3
  gRNA
cactgcgtgttctgtcgccg

SEQ ID NO: 136291 - DNA, 20 bp, Artificial Sequence
  mmSKRIPTE0007070_Trim8_4
  gRNA
gtagccactgtcgccgccaa

SEQ ID NO: 136292 - DNA, 20 bp, Artificial Sequence
  mmSKRIPTE0007071_Trim8_5
  gRNA
agcgtacccctgtacccttg

SEQ ID NO: 136293 - DNA, 20 bp, Artificial Sequence
  mmSKRIPTE0007072_Trim8_6
  gRNA
ctctcgtgacattagcctag

SEQ ID NO: 136294 - DNA, 20 bp, Artificial Sequence
  mmSKRIPTE0007073_Trim8_7
  gRNA
ggagcgcagaagtagcgacg

SEQ ID NO: 136295 - DNA, 20 bp, Artificial Sequence
  mmSKRIPTE0007074_Trim8_8
  gRNA
tttcagtaatgggaaacgcg

SEQ ID NO: 136296 - DNA, 20 bp, Artificial Sequence
  mmSKRIPTE0007075_Trim8_9
  gRNA
gaggcagtatagcttaaccc

SEQ ID NO: 136297 - DNA, 20 bp, Artificial Sequence
  mmSKRIPTE0007076_Tnfsf8_1
  gRNA
aattgtagcgagatagacga

SEQ ID NO: 136298 - DNA, 20 bp, Artificial Sequence
  mmSKRIPTE0007077_Tnfsf8_2
  gRNA
ccacagaacgccttgccgcg

SEQ ID NO: 136299 - DNA, 20 bp, Artificial Sequence
  mmSKRIPTE0007078_Tnfsf8_3
  gRNA
tggattagcacagtgatcag

SEQ ID NO: 136300 - DNA, 20 bp, Artificial Sequence
  mmSKRIPTE0007079_Tnfsf8_4
  gRNA
tcctttcccaataactagag

SEQ ID NO: 136301 - DNA, 20 bp, Artificial Sequence
  mmSKRIPTE0007080_Tnfsf8_5
  gRNA
aacaaggcacaccagtgcgg

SEQ ID NO: 136302 - DNA, 20 bp, Artificial Sequence
  mmSKRIPTE0007081_Tnfsf8_6
  gRNA
ctgatacttcggactcatct

SEQ ID NO: 136303 - DNA, 20 bp, Artificial Sequence
  mmSKRIPTE0007082_Tnfsf8_7
  gRNA
caactcagaagacgagactg

SEQ ID NO: 136304 - DNA, 20 bp, Artificial Sequence
  mmSKRIPTE0007083_Tnfsf8_8
  gRNA
acggatagcacattatcaag

SEQ ID NO: 136305 - DNA, 20 bp, Artificial Sequence
  mmSKRIPTE0007084_Tnfsf8_9
  gRNA
gcagtgctcaaatcattctg

SEQ ID NO: 136306 - DNA, 20 bp, Artificial Sequence
  mmSKRIPTE0007085_Fgr_1
  gRNA
ttatgtgtactacgtaggga

SEQ ID NO: 136307 - DNA, 20 bp, Artificial Sequence
  mmSKRIPTE0007086_Fgr_2
  gRNA
accagcatgagtattccact

SEQ ID NO: 136308 - DNA, 20 bp, Artificial Sequence
  mmSKRIPTE0007087_Fgr_3
  gRNA
ggagtcaaactgggcccgtg

SEQ ID NO: 136309 - DNA, 20 bp, Artificial Sequence
  mmSKRIPTE0007088_Fgr_4
  gRNA
cgggaaagcgagaccaccaa

SEQ ID NO: 136310 - DNA, 20 bp, Artificial Sequence
  mmSKRIPTE0007089_Fgr_5
  gRNA
tcactgtcaaatcagacgtg

SEQ ID NO: 136311 - DNA, 20 bp, Artificial Sequence
  mmSKRIPTE0007090_Fgr_6
  gRNA
ttgctcttgccaatcccccg

SEQ ID NO: 136312 - DNA, 20 bp, Artificial Sequence
  mmSKRIPTE0007091_Fgr_7
  gRNA
atgtatatcagccatagagt

SEQ ID NO: 136313 - DNA, 20 bp, Artificial Sequence
  mmSKRIPTE0007092_Fgr_8
  gRNA
gtgactcacatcaggatcgg

SEQ ID NO: 136314 - DNA, 20 bp, Artificial Sequence
  mmSKRIPTE0007093_Fgr_9
  gRNA
tgaacaatacgtaagtgact

SEQ ID NO: 136315 - DNA, 20 bp, Artificial Sequence
  mmSKRIPTE0007094_Cyp26b1_1
  gRNA
catccaccgcaacaagcgca

SEQ ID NO: 136316 - DNA, 20 bp, Artificial Sequence
  mmSKRIPTE0007095_Cyp26b1_2
  gRNA
cagtacagggaaccgcacag

SEQ ID NO: 136317 - DNA, 20 bp, Artificial Sequence
  mmSKRIPTE0007096_Cyp26b1_3
  gRNA
cctggaggaagaccggacag

SEQ ID NO: 136318 - DNA, 20 bp, Artificial Sequence
  mmSKRIPTE0007097_Cyp26b1_4
  gRNA
gctgattcgtgtgaccggtg

SEQ ID NO: 136319 - DNA, 20 bp, Artificial Sequence
  mmSKRIPTE0007098_Cyp26b1_5
  gRNA
gcaggccgtattacccctag

SEQ ID NO: 136320 - DNA, 20 bp, Artificial Sequence
  mmSKRIPTE0007099_Cyp26b1_6
  gRNA
accagctagtgagcaccgag

SEQ ID NO: 136321 - DNA, 20 bp, Artificial Sequence
  mmSKRIPTE0007100_Cyp26b1_7
  gRNA
ggctgcgaagatcaactcca

SEQ ID NO: 136322 - DNA, 20 bp, Artificial Sequence
  mmSKRIPTE0007101_Cyp26b1_8
  gRNA
tccgggtggccagctcgaag

SEQ ID NO: 136323 - DNA, 20 bp, Artificial Sequence
  mmSKRIPTE0007102_Cyp26b1_9
  gRNA
aaacacaggtggtaaactga

SEQ ID NO: 136324 - DNA, 20 bp, Artificial Sequence
  mmSKRIPTE0007103_Il27_1
  gRNA
agggccgaagtgtggtagcg

SEQ ID NO: 136325 - DNA, 20 bp, Artificial Sequence
  mmSKRIPTE0007104_Il27_2
  gRNA
cttgccgttcacttacagag

SEQ ID NO: 136326 - DNA, 20 bp, Artificial Sequence
  mmSKRIPTE0007105_Il27_3
  gRNA
agtttgcttgtagatccccg

SEQ ID NO: 136327 - DNA, 20 bp, Artificial Sequence
  mmSKRIPTE0007106_Il27_4
  gRNA
ttacactagtctcattcccg

SEQ ID NO: 136328 - DNA, 20 bp, Artificial Sequence
  mmSKRIPTE0007107_Il27_5
  gRNA
gttggccacgtagacaggca

SEQ ID NO: 136329 - DNA, 20 bp, Artificial Sequence
  mmSKRIPTE0007108_Il27_6
  gRNA
tagctcgtttgccttagacc

SEQ ID NO: 136330 - DNA, 20 bp, Artificial Sequence
  mmSKRIPTE0007109_Il27_7
  gRNA
cttagagtcttaacgggcga

SEQ ID NO: 136331 - DNA, 20 bp, Artificial Sequence
  mmSKRIPTE0007110_Il27_8
  gRNA
cgcactctacctgaaagcgg

SEQ ID NO: 136332 - DNA, 20 bp, Artificial Sequence
  mmSKRIPTE0007111_Il27_9
  gRNA
gcaatcgagattcagcctga

SEQ ID NO: 136333 - DNA, 20 bp, Artificial Sequence
  mmSKRIPTE0007112_Hras_1
  gRNA
catctattagccgtctcaag

SEQ ID NO: 136334 - DNA, 20 bp, Artificial Sequence
  mmSKRIPTE0007113_Hras_2
  gRNA
gttcaacttgagacgtactg

SEQ ID NO: 136335 - DNA, 20 bp, Artificial Sequence
  mmSKRIPTE0007114_Hras_3
  gRNA
caggaccactctcatcgggt

SEQ ID NO: 136336 - DNA, 20 bp, Artificial Sequence
  mmSKRIPTE0007115_Hras_4
  gRNA
gggaagggctgtatagtccg

SEQ ID NO: 136337 - DNA, 20 bp, Artificial Sequence
  mmSKRIPTE0007116_Hras_5
  gRNA
gcgcatgtactggtcccgca

SEQ ID NO: 136338 - DNA, 20 bp, Artificial Sequence
  mmSKRIPTE0007117_Hras_6
  gRNA
ggtgccacaggtgatcaact

SEQ ID NO: 136339 - DNA, 20 bp, Artificial Sequence
  mmSKRIPTE0007118_Hras_7
  gRNA
gatcatactcgtccacaaag

SEQ ID NO: 136340 - DNA, 20 bp, Artificial Sequence
  mmSKRIPTE0007119_Hras_8
  gRNA
tgtaagtctcccagaccgca

SEQ ID NO: 136341 - DNA, 20 bp, Artificial Sequence
  mmSKRIPTE0007120_Hras_9
  gRNA
ggtgtgacctgatctaggca

SEQ ID NO: 136342 - DNA, 20 bp, Artificial Sequence
  mmSKRIPTE0007121_Lig4_1
  gRNA
aattagacgtcctaattgtg

SEQ ID NO: 136343 - DNA, 20 bp, Artificial Sequence
  mmSKRIPTE0007122_Lig4_2
  gRNA
gacacgatttcttcacccgg

SEQ ID NO: 136344 - DNA, 20 bp, Artificial Sequence
  mmSKRIPTE0007123_Lig4_3
  gRNA
taatgtcgaaacatactgag

SEQ ID NO: 136345 - DNA, 20 bp, Artificial Sequence
  mmSKRIPTE0007124_Lig4_4
  gRNA
cacatgtgaatcataaagcg

SEQ ID NO: 136346 - DNA, 20 bp, Artificial Sequence
  mmSKRIPTE0007125_Lig4_5
  gRNA
attaaaccagagtacgtcag

SEQ ID NO: 136347 - DNA, 20 bp, Artificial Sequence
  mmSKRIPTE0007126_Lig4_6
  gRNA
tggagattcaccaaactggt

SEQ ID NO: 136348 - DNA, 20 bp, Artificial Sequence
  mmSKRIPTE0007127_Lig4_7
  gRNA
gtggtaaagtcgatgaccac

SEQ ID NO: 136349 - DNA, 20 bp, Artificial Sequence
  mmSKRIPTE0007128_Lig4_8
  gRNA
ttgctgaacttaccacgaga

SEQ ID NO: 136350 - DNA, 20 bp, Artificial Sequence
  mmSKRIPTE0007129_Lig4_9
  gRNA
aggccatcatctcaccgtca

SEQ ID NO: 136351 - DNA, 20 bp, Artificial Sequence
  mmSKRIPTE0007130_Hmox1_1
  gRNA
ggactgaactgtatcaacgg

SEQ ID NO: 136352 - DNA, 20 bp, Artificial Sequence
  mmSKRIPTE0007131_Hmox1_2
  gRNA
gcctgttaatgatactcacg

SEQ ID NO: 136353 - DNA, 20 bp, Artificial Sequence
  mmSKRIPTE0007132_Hmox1_3
  gRNA
agatggcgtcacttcgtcag

SEQ ID NO: 136354 - DNA, 20 bp, Artificial Sequence
  mmSKRIPTE0007133_Hmox1_4
  gRNA
cttatgccaataatttaacg

SEQ ID NO: 136355 - DNA, 20 bp, Artificial Sequence
  mmSKRIPTE0007134_Hmox1_5
  gRNA
gcgccagccctttaagtacg

SEQ ID NO: 136356 - DNA, 20 bp, Artificial Sequence
  mmSKRIPTE0007135_Hmox1_6
  gRNA
aaggggaagaagactcatcg

SEQ ID NO: 136357 - DNA, 20 bp, Artificial Sequence
  mmSKRIPTE0007136_Hmox1_7
  gRNA
cccctgcagagacaccccga

SEQ ID NO: 136358 - DNA, 20 bp, Artificial Sequence
  mmSKRIPTE0007137_Hmox1_8
  gRNA
gctccgggctatgctcgaga

SEQ ID NO: 136359 - DNA, 20 bp, Artificial Sequence
  mmSKRIPTE0007138_Hmox1_9
  gRNA
ggggctgtcgatgttcggga

SEQ ID NO: 136360 - DNA, 20 bp, Artificial Sequence
  mmSKRIPTE0007139_Icam1_1
  gRNA
acgtggatggtggagcaccg

SEQ ID NO: 136361 - DNA, 20 bp, Artificial Sequence
  mmSKRIPTE0007140_Icam1_2
  gRNA
ccatcaccgtgtattgtgag

SEQ ID NO: 136362 - DNA, 20 bp, Artificial Sequence
  mmSKRIPTE0007141_Icam1_3
  gRNA
ggaaacgctgcaaggaaacg

SEQ ID NO: 136363 - DNA, 20 bp, Artificial Sequence
  mmSKRIPTE0007142_Icam1_4
  gRNA
agggcttcggtatttccggg

SEQ ID NO: 136364 - DNA, 20 bp, Artificial Sequence
  mmSKRIPTE0007143_Icam1_5
  gRNA
cagtccgtctcgtccagccg

SEQ ID NO: 136365 - DNA, 20 bp, Artificial Sequence
  mmSKRIPTE0007144_Icam1_6
  gRNA
gtacagtcatcacatcagtt

SEQ ID NO: 136366 - DNA, 20 bp, Artificial Sequence
  mmSKRIPTE0007145_Icam1_7
  gRNA
cagtgtgaattggacctgcg

SEQ ID NO: 136367 - DNA, 20 bp, Artificial Sequence
  mmSKRIPTE0007146_Icam1_8
  gRNA
gagcctccggactttcggtg

SEQ ID NO: 136368 - DNA, 20 bp, Artificial Sequence
  mmSKRIPTE0007147_Icam1_9
  gRNA
taagatgacctgcagacgga

SEQ ID NO: 136369 - DNA, 20 bp, Artificial Sequence
  mmSKRIPTE0007148_Efnb1_1
  gRNA
ctcccattggacgttgctgt

SEQ ID NO: 136370 - DNA, 20 bp, Artificial Sequence
  mmSKRIPTE0007149_Efnb1_2
  gRNA
gtcgatttgatagctccacc

SEQ ID NO: 136371 - DNA, 20 bp, Artificial Sequence
  mmSKRIPTE0007150_Efnb1_3
  gRNA
cagaggcgtcaatcccagga

SEQ ID NO: 136372 - DNA, 20 bp, Artificial Sequence
  mmSKRIPTE0007151_Efnb1_4
  gRNA
tcttcagggagacccgatcg

SEQ ID NO: 136373 - DNA, 20 bp, Artificial Sequence
  mmSKRIPTE0007152_Efnb1_5
  gRNA
acactcgggctcaatcgccg

SEQ ID NO: 136374 - DNA, 20 bp, Artificial Sequence
  mmSKRIPTE0007153_Efnb1_6
  gRNA
ggctagggtactgagcgaga

SEQ ID NO: 136375 - DNA, 20 bp, Artificial Sequence
  mmSKRIPTE0007154_Efnb1_7
  gRNA
atggcacgaatctgaatgtg

SEQ ID NO: 136376 - DNA, 20 bp, Artificial Sequence
  mmSKRIPTE0007155_Efnb1_8
  gRNA
attaattaccgtgagagtga

SEQ ID NO: 136377 - DNA, 20 bp, Artificial Sequence
  mmSKRIPTE0007156_Efnb1_9
  gRNA
agagccgagcggaatccggc

SEQ ID NO: 136378 - DNA, 20 bp, Artificial Sequence
  mmSKRIPTE0007157_Il1r1_1
  gRNA
gtatgtcctatacgttccgg

SEQ ID NO: 136379 - DNA, 20 bp, Artificial Sequence
  mmSKRIPTE0007158_Il1r1_2
  gRNA
gttctaaggcctgataggaa

SEQ ID NO: 136380 - DNA, 20 bp, Artificial Sequence
  mmSKRIPTE0007159_Il1r1_3
  gRNA
cagttgtgcgttcaagaccg

SEQ ID NO: 136381 - DNA, 20 bp, Artificial Sequence
  mmSKRIPTE0007160_Il1r1_4
  gRNA
gacttccatccccggcaatg

SEQ ID NO: 136382 - DNA, 20 bp, Artificial Sequence
  mmSKRIPTE0007161_Il1r1_5
  gRNA
aaacagagctcaatgtacca

SEQ ID NO: 136383 - DNA, 20 bp, Artificial Sequence
  mmSKRIPTE0007162_Il1r1_6
  gRNA
ctccggtgtcacaagatcgg

SEQ ID NO: 136384 - DNA, 20 bp, Artificial Sequence
  mmSKRIPTE0007163_Il1r1_7
  gRNA
gcagcaacacacttaccact

SEQ ID NO: 136385 - DNA, 20 bp, Artificial Sequence
  mmSKRIPTE0007164_Il1r1_8
  gRNA
gttcctgaaatagggtcgca

SEQ ID NO: 136386 - DNA, 20 bp, Artificial Sequence
  mmSKRIPTE0007165_Il1r1_9
  gRNA
actaactcagtactcgtggg

SEQ ID NO: 136387 - DNA, 20 bp, Artificial Sequence
  mmSKRIPTE0007166_Casp8_1
  gRNA
aggagcctgtacaatccgat

SEQ ID NO: 136388 - DNA, 20 bp, Artificial Sequence
  mmSKRIPTE0007167_Casp8_2
  gRNA
cttcctagactgcaaccgag

SEQ ID NO: 136389 - DNA, 20 bp, Artificial Sequence
  mmSKRIPTE0007168_Casp8_3
  gRNA
agactgcgggctaaatgtag

SEQ ID NO: 136390 - DNA, 20 bp, Artificial Sequence
  mmSKRIPTE0007169_Casp8_4
  gRNA
gctttctaggtttcggagtg

SEQ ID NO: 136391 - DNA, 20 bp, Artificial Sequence
  mmSKRIPTE0007170_Casp8_5
  gRNA
tccattcacaggatctcggt

SEQ ID NO: 136392 - DNA, 20 bp, Artificial Sequence
  mmSKRIPTE0007171_Casp8_6
  gRNA
ctgccagataagccaataag

SEQ ID NO: 136393 - DNA, 20 bp, Artificial Sequence
  mmSKRIPTE0007172_Casp8_7
  gRNA
caagacagtgagtcacgggt

SEQ ID NO: 136394 - DNA, 20 bp, Artificial Sequence
  mmSKRIPTE0007173_Casp8_8
  gRNA
aagatgctaatgatcaagtg

SEQ ID NO: 136395 - DNA, 20 bp, Artificial Sequence
  mmSKRIPTE0007174_Casp8_9
  gRNA
gtcacacttaggacaaccta

SEQ ID NO: 136396 - DNA, 20 bp, Artificial Sequence
  mmSKRIPTE0007175_Rab7b_1
  gRNA
gtgacaattatggtacaaca

SEQ ID NO: 136397 - DNA, 20 bp, Artificial Sequence
  mmSKRIPTE0007176_Rab7b_2
  gRNA
agacggaatgcccagcaacg

SEQ ID NO: 136398 - DNA, 20 bp, Artificial Sequence
  mmSKRIPTE0007177_Rab7b_3
  gRNA
aacaagtactagaagctcgg

SEQ ID NO: 136399 - DNA, 20 bp, Artificial Sequence
  mmSKRIPTE0007178_Rab7b_4
  gRNA
cttcagtgaccgagtatggg

SEQ ID NO: 136400 - DNA, 20 bp, Artificial Sequence
  mmSKRIPTE0007179_Rab7b_5
  gRNA
agacgcccgtgatttctctg

SEQ ID NO: 136401 - DNA, 20 bp, Artificial Sequence
  mmSKRIPTE0007180_Rab7b_6
  gRNA
aagtgtgcccttccgcaccc

SEQ ID NO: 136402 - DNA, 20 bp, Artificial Sequence
  mmSKRIPTE0007181_Rab7b_7
  gRNA
agctgtcatcgggagtccgg

SEQ ID NO: 136403 - DNA, 20 bp, Artificial Sequence
  mmSKRIPTE0007182_Rab7b_8
  gRNA
gaatctttgtttcctcagcg

SEQ ID NO: 136404 - DNA, 20 bp, Artificial Sequence
  mmSKRIPTE0007183_Rab7b_9
  gRNA
ggtgtgccagtgaagagacg

SEQ ID NO: 136405 - DNA, 20 bp, Artificial Sequence
  mmSKRIPTE0007184_Dapk3_1
  gRNA
ctcatagttcacgatctcgg

SEQ ID NO: 136406 - DNA, 20 bp, Artificial Sequence
  mmSKRIPTE0007185_Dapk3_2
  gRNA
gggaccgctactaatgcact

SEQ ID NO: 136407 - DNA, 20 bp, Artificial Sequence
  mmSKRIPTE0007186_Dapk3_3
  gRNA
actaagactgtacctgctag

SEQ ID NO: 136408 - DNA, 20 bp, Artificial Sequence
  mmSKRIPTE0007187_Dapk3_4
  gRNA
cggatccgacttctcccaag

SEQ ID NO: 136409 - DNA, 20 bp, Artificial Sequence
  mmSKRIPTE0007188_Dapk3_5
  gRNA
agttcacatagagacgtgca

SEQ ID NO: 136410 - DNA, 20 bp, Artificial Sequence
  mmSKRIPTE0007189_Dapk3_6
  gRNA
tgggaacctgaagtctggcg

SEQ ID NO: 136411 - DNA, 20 bp, Artificial Sequence
  mmSKRIPTE0007190_Dapk3_7
  gRNA
cccaagtaggcggcccatgg

SEQ ID NO: 136412 - DNA, 20 bp, Artificial Sequence
  mmSKRIPTE0007191_Dapk3_8
  gRNA
catgtccacattcaggcaag

SEQ ID NO: 136413 - DNA, 20 bp, Artificial Sequence
  mmSKRIPTE0007192_Dapk3_9
  gRNA
cctgtggtacaaacgcatag

SEQ ID NO: 136414 - DNA, 20 bp, Artificial Sequence
  mmSKRIPTE0007193_Havcr2_1
  gRNA
actaacgtggtaatcactgg

SEQ ID NO: 136415 - DNA, 20 bp, Artificial Sequence
  mmSKRIPTE0007194_Havcr2_2
  gRNA
gtatctggcgaatgtccatg

SEQ ID NO: 136416 - DNA, 20 bp, Artificial Sequence
  mmSKRIPTE0007195_Havcr2_3
  gRNA
gagatgaggctcggacagtg

SEQ ID NO: 136417 - DNA, 20 bp, Artificial Sequence
  mmSKRIPTE0007196_Havcr2_4
  gRNA
atgtgactctggatgaccat

SEQ ID NO: 136418 - DNA, 20 bp, Artificial Sequence
  mmSKRIPTE0007197_Havcr2_5
  gRNA
ccggtgactgggacatacga

SEQ ID NO: 136419 - DNA, 20 bp, Artificial Sequence
  mmSKRIPTE0007198_Havcr2_6
  gRNA
gctgacggacaatgataaca

SEQ ID NO: 136420 - DNA, 20 bp, Artificial Sequence
  mmSKRIPTE0007199_Havcr2_7
  gRNA
ttgttacagccttattacac

SEQ ID NO: 136421 - DNA, 20 bp, Artificial Sequence
  mmSKRIPTE0007200_Havcr2_8
  gRNA
gaggaagctaaatgtaccag

SEQ ID NO: 136422 - DNA, 20 bp, Artificial Sequence
  mmSKRIPTE0007201_Havcr2_9
  gRNA
ttacactctatctacacctg

SEQ ID NO: 136423 - DNA, 20 bp, Artificial Sequence
  mmSKRIPTE0007202_Siva1_1
  gRNA
ctgtgcagctatgccgacga

SEQ ID NO: 136424 - DNA, 20 bp, Artificial Sequence
  mmSKRIPTE0007203_Siva1_2
  gRNA
taactctccaaaccgcaaag

SEQ ID NO: 136425 - DNA, 20 bp, Artificial Sequence
  mmSKRIPTE0007204_Siva1_3
  gRNA
gctcccggagaaatccgagt

SEQ ID NO: 136426 - DNA, 20 bp, Artificial Sequence
  mmSKRIPTE0007205_Siva1_4
  gRNA
taatgggaggagcaccggag

SEQ ID NO: 136427 - DNA, 20 bp, Artificial Sequence
  mmSKRIPTE0007206_Siva1_5
  gRNA
cggtgagtgtggacttccgt

SEQ ID NO: 136428 - DNA, 20 bp, Artificial Sequence
  mmSKRIPTE0007207_Siva1_6
  gRNA
cctgtgaggagaaaacaccg

SEQ ID NO: 136429 - DNA, 20 bp, Artificial Sequence
  mmSKRIPTE0007208_Siva1_7
  gRNA
tcttccctaggtgtaacagc

SEQ ID NO: 136430 - DNA, 20 bp, Artificial Sequence
  mmSKRIPTE0007209_Siva1_8
  gRNA
cgagcggactagcctagcgc

SEQ ID NO: 136431 - DNA, 20 bp, Artificial Sequence
  mmSKRIPTE0007210_Siva1_9
  gRNA
tagactaaaggctcacgatg

SEQ ID NO: 136432 - DNA, 20 bp, Artificial Sequence
  mmSKRIPTE0007211_Il6st_1
  gRNA
gaatttccagttgtccagcg

SEQ ID NO: 136433 - DNA, 20 bp, Artificial Sequence
  mmSKRIPTE0007212_Il6st_2
  gRNA
gctgaggtgcatcaacagtg

SEQ ID NO: 136434 - DNA, 20 bp, Artificial Sequence
  mmSKRIPTE0007213_Il6st_3
  gRNA
tacctatagattcagtggtg

SEQ ID NO: 136435 - DNA, 20 bp, Artificial Sequence
  mmSKRIPTE0007214_Il6st_4
  gRNA
cctcagcagctgtctcacag

SEQ ID NO: 136436 - DNA, 20 bp, Artificial Sequence
  mmSKRIPTE0007215_Il6st_5
  gRNA
ctgctagagacgcgacatag

SEQ ID NO: 136437 - DNA, 20 bp, Artificial Sequence
  mmSKRIPTE0007216_Il6st_6
  gRNA
catatcttacagaaccagcg

SEQ ID NO: 136438 - DNA, 20 bp, Artificial Sequence
  mmSKRIPTE0007217_Il6st_7
  gRNA
cctgcaagatgtcagcacca

SEQ ID NO: 136439 - DNA, 20 bp, Artificial Sequence
  mmSKRIPTE0007218_Il6st_8
  gRNA
gcgccatgtcatctgatgtg

SEQ ID NO: 136440 - DNA, 20 bp, Artificial Sequence
  mmSKRIPTE0007219_Il6st_9
  gRNA
ttgacacttcaatgttcacg

SEQ ID NO: 136441 - DNA, 20 bp, Artificial Sequence
  mmSKRIPTE0007220_Vegfb_1
  gRNA
tccgccctacaaccgcccag

SEQ ID NO: 136442 - DNA, 20 bp, Artificial Sequence
  mmSKRIPTE0007221_Vegfb_2
  gRNA
actagcgggccttcgccaag

SEQ ID NO: 136443 - DNA, 20 bp, Artificial Sequence
  mmSKRIPTE0007222_Vegfb_3
  gRNA
tgctccaggacataaccttg

SEQ ID NO: 136444 - DNA, 20 bp, Artificial Sequence
  mmSKRIPTE0007223_Vegfb_4
  gRNA
aaagcccaagccttagcgct

SEQ ID NO: 136445 - DNA, 20 bp, Artificial Sequence
  mmSKRIPTE0007224_Vegfb_5
  gRNA
cgtgcataaacgtctatcca

SEQ ID NO: 136446 - DNA, 20 bp, Artificial Sequence
  mmSKRIPTE0007225_Vegfb_6
  gRNA
tgggcgataccattccatag

SEQ ID NO: 136447 - DNA, 20 bp, Artificial Sequence
  mmSKRIPTE0007226_Vegfb_7
  gRNA
gaggagaagcgacacgtctg

SEQ ID NO: 136448 - DNA, 20 bp, Artificial Sequence
  mmSKRIPTE0007227_Vegfb_8
  gRNA
gcgaacctcctcagtctggg

SEQ ID NO: 136449 - DNA, 20 bp, Artificial Sequence
  mmSKRIPTE0007228_Vegfb_9
  gRNA
cgcctgctacctctgtcgag

SEQ ID NO: 136450 - DNA, 20 bp, Artificial Sequence
  mmSKRIPTE0007229_Fcnb_1
  gRNA
acgctctaaccacccagggt

SEQ ID NO: 136451 - DNA, 20 bp, Artificial Sequence
  mmSKRIPTE0007230_Fcnb_2
  gRNA
actgtccggaaaggacacct

SEQ ID NO: 136452 - DNA, 20 bp, Artificial Sequence
  mmSKRIPTE0007231_Fcnb_3
  gRNA
gcactggttagggtcaactg

SEQ ID NO: 136453 - DNA, 20 bp, Artificial Sequence
  mmSKRIPTE0007232_Fcnb_4
  gRNA
tccatgcccagacataccta

SEQ ID NO: 136454 - DNA, 20 bp, Artificial Sequence
  mmSKRIPTE0007233_Fcnb_5
  gRNA
tggcagaccccatacacctg

SEQ ID NO: 136455 - DNA, 20 bp, Artificial Sequence
  mmSKRIPTE0007234_Fcnb_6
  gRNA
tcattggagacagtagtcag

SEQ ID NO: 136456 - DNA, 20 bp, Artificial Sequence
  mmSKRIPTE0007235_Fcnb_7
  gRNA
tctctgcaaagctatagagg

SEQ ID NO: 136457 - DNA, 20 bp, Artificial Sequence
  mmSKRIPTE0007236_Fcnb_8
  gRNA
aacttggaattcaccggggt

SEQ ID NO: 136458 - DNA, 20 bp, Artificial Sequence
  mmSKRIPTE0007237_Fcnb_9
  gRNA
agcaactccttgcaggtccg

SEQ ID NO: 136459 - DNA, 20 bp, Artificial Sequence
  mmSKRIPTE0007238_Vav3_1
  gRNA
ggatactgcgttgaacaaca

SEQ ID NO: 136460 - DNA, 20 bp, Artificial Sequence
  mmSKRIPTE0007239_Vav3_2
  gRNA
aaccaggatagcatcttgcg

SEQ ID NO: 136461 - DNA, 20 bp, Artificial Sequence
  mmSKRIPTE0007240_Vav3_3
  gRNA
atctactggtttaggtacct

SEQ ID NO: 136462 - DNA, 20 bp, Artificial Sequence
  mmSKRIPTE0007241_Vav3_4
  gRNA
ggatcccaagatgaacaaca

SEQ ID NO: 136463 - DNA, 20 bp, Artificial Sequence
  mmSKRIPTE0007242_Vav3_5
  gRNA
aataccgtactcttagctcg

SEQ ID NO: 136464 - DNA, 20 bp, Artificial Sequence
  mmSKRIPTE0007243_Vav3_6
  gRNA
tggattgagtcaatacaatg

SEQ ID NO: 136465 - DNA, 20 bp, Artificial Sequence
  mmSKRIPTE0007244_Vav3_7
  gRNA
tggaatgaacctgatcacac

SEQ ID NO: 136466 - DNA, 20 bp, Artificial Sequence
  mmSKRIPTE0007245_Vav3_8
  gRNA
acagaagtcgtaccgagcga

SEQ ID NO: 136467 - DNA, 20 bp, Artificial Sequence
  mmSKRIPTE0007246_Vav3_9
  gRNA
gagaagtcctagcccccatg

SEQ ID NO: 136468 - DNA, 20 bp, Artificial Sequence
  mmSKRIPTE0007247_Cxcl2_1
  gRNA
ggggatcattataaggcacg

SEQ ID NO: 136469 - DNA, 20 bp, Artificial Sequence
  mmSKRIPTE0007248_Cxcl2_2
  gRNA
acgatgtctggaaaagcccg

SEQ ID NO: 136470 - DNA, 20 bp, Artificial Sequence
  mmSKRIPTE0007249_Cxcl2_3
  gRNA
tagatagaaccaactagcgc

SEQ ID NO: 136471 - DNA, 20 bp, Artificial Sequence
  mmSKRIPTE0007250_Cxcl2_4
  gRNA
tcctgacaccttcaatacga

SEQ ID NO: 136472 - DNA, 20 bp, Artificial Sequence
  mmSKRIPTE0007251_Cxcl2_5
  gRNA
cagcgaccatccattaagga

SEQ ID NO: 136473 - DNA, 20 bp, Artificial Sequence
  mmSKRIPTE0007252_Cxcl2_6
  gRNA
gcaaggcactgtgccttacg

SEQ ID NO: 136474 - DNA, 20 bp, Artificial Sequence
  mmSKRIPTE0007253_Cxcl2_7
  gRNA
agaaaatggttgctgttagt

SEQ ID NO: 136475 - DNA, 20 bp, Artificial Sequence
  mmSKRIPTE0007254_Cxcl2_8
  gRNA
aggtacgatccaggcttccc

SEQ ID NO: 136476 - DNA, 20 bp, Artificial Sequence
  mmSKRIPTE0007255_Cxcl2_9
  gRNA
aagtgaactctcagacagcg

SEQ ID NO: 136477 - DNA, 20 bp, Artificial Sequence
  mmSKRIPTE0007256_Pla2g1b_1
  gRNA
actccgaactgctttacccg

SEQ ID NO: 136478 - DNA, 20 bp, Artificial Sequence
  mmSKRIPTE0007257_Pla2g1b_2
  gRNA
atctggaaaccatccccttg

SEQ ID NO: 136479 - DNA, 20 bp, Artificial Sequence
  mmSKRIPTE0007258_Pla2g1b_3
  gRNA
aagaatacacacgacgctca

SEQ ID NO: 136480 - DNA, 20 bp, Artificial Sequence
  mmSKRIPTE0007259_Pla2g1b_4
  gRNA
ctatcgggggaacaacacag

SEQ ID NO: 136481 - DNA, 20 bp, Artificial Sequence
  mmSKRIPTE0007260_Pla2g1b_5
  gRNA
actgggattgaataaaggcg

SEQ ID NO: 136482 - DNA, 20 bp, Artificial Sequence
  mmSKRIPTE0007261_Pla2g1b_6
  gRNA
attccagcgtgaccagtggg

SEQ ID NO: 136483 - DNA, 20 bp, Artificial Sequence
  mmSKRIPTE0007262_Pla2g1b_7
  gRNA
ccttcaggggatcactcccg

SEQ ID NO: 136484 - DNA, 20 bp, Artificial Sequence
  mmSKRIPTE0007263_Pla2g1b_8
  gRNA
ggaactgccacacagcccga

SEQ ID NO: 136485 - DNA, 20 bp, Artificial Sequence
  mmSKRIPTE0007264_Pla2g1b_9
  gRNA
caatcacatctcgtctcgag

SEQ ID NO: 136486 - DNA, 20 bp, Artificial Sequence
  mmSKRIPTE0007265_Rab35_1
  gRNA
actcggctaggacacgaggt

SEQ ID NO: 136487 - DNA, 20 bp, Artificial Sequence
  mmSKRIPTE0007266_Rab35_2
  gRNA
tggccctacaggtattatcg

SEQ ID NO: 136488 - DNA, 20 bp, Artificial Sequence
  mmSKRIPTE0007267_Rab35_3
  gRNA
cccagctcaccggaaccatg

SEQ ID NO: 136489 - DNA, 20 bp, Artificial Sequence
  mmSKRIPTE0007268_Rab35_4
  gRNA
ctacatcaccacaatcggag

SEQ ID NO: 136490 - DNA, 20 bp, Artificial Sequence
  mmSKRIPTE0007269_Rab35_5
  gRNA
gcagcaacaacagaacgatg

SEQ ID NO: 136491 - DNA, 20 bp, Artificial Sequence
  mmSKRIPTE0007270_Rab35_6
  gRNA
aaaaatactgagcccgatgt

SEQ ID NO: 136492 - DNA, 20 bp, Artificial Sequence
  mmSKRIPTE0007271_Rab35_7
  gRNA
tgccaaggagaacgtcaatg

SEQ ID NO: 136493 - DNA, 20 bp, Artificial Sequence
  mmSKRIPTE0007272_Rab35_8
  gRNA
gtaatgcaaaaaccaccagt

SEQ ID NO: 136494 - DNA, 20 bp, Artificial Sequence
  mmSKRIPTE0007273_Rab35_9
  gRNA
agttgcgtgacattgctgaa

SEQ ID NO: 136495 - DNA, 20 bp, Artificial Sequence
  mmSKRIPTE0007274_Cxcl12_1
  gRNA
tctctgacgcgcatcccctg

SEQ ID NO: 136496 - DNA, 20 bp, Artificial Sequence
  mmSKRIPTE0007275_Cxcl12_2
  gRNA
gactttccagtagacccccg

SEQ ID NO: 136497 - DNA, 20 bp, Artificial Sequence
  mmSKRIPTE0007276_Cxcl12_3
  gRNA
tcaacacaagatccggcaga

SEQ ID NO: 136498 - DNA, 20 bp, Artificial Sequence
  mmSKRIPTE0007277_Cxcl12_4
  gRNA
gtggaccgagagtgaaagtg

SEQ ID NO: 136499 - DNA, 20 bp, Artificial Sequence
  mmSKRIPTE0007278_Cxcl12_5
  gRNA
accgtcactgatgcagagcg

SEQ ID NO: 136500 - DNA, 20 bp, Artificial Sequence
  mmSKRIPTE0007279_Cxcl12_6
  gRNA
tcgcggagaaagaactcggt

SEQ ID NO: 136501 - DNA, 20 bp, Artificial Sequence
  mmSKRIPTE0007280_Cxcl12_7
  gRNA
atggcatatcagtgtccccg

SEQ ID NO: 136502 - DNA, 20 bp, Artificial Sequence
  mmSKRIPTE0007281_Cxcl12_8
  gRNA
attggtccgtcaggctacag

SEQ ID NO: 136503 - DNA, 20 bp, Artificial Sequence
  mmSKRIPTE0007282_Cxcl12_9
  gRNA
gttcactacaagcgaacttg

SEQ ID NO: 136504 - DNA, 20 bp, Artificial Sequence
  mmSKRIPTE0007283_Cd151_1
  gRNA
gcacacggcaccatgccgag

SEQ ID NO: 136505 - DNA, 20 bp, Artificial Sequence
  mmSKRIPTE0007284_Cd151_2
  gRNA
ctgagtacaccactacacgt

SEQ ID NO: 136506 - DNA, 20 bp, Artificial Sequence
  mmSKRIPTE0007285_Cd151_3
  gRNA
agagacaataagatgccggt

SEQ ID NO: 136507 - DNA, 20 bp, Artificial Sequence
  mmSKRIPTE0007286_Cd151_4
  gRNA
gtacagacctcggctgacgc

SEQ ID NO: 136508 - DNA, 20 bp, Artificial Sequence
  mmSKRIPTE0007287_Cd151_5
  gRNA
agctctcctcccgactgtag

SEQ ID NO: 136509 - DNA, 20 bp, Artificial Sequence
  mmSKRIPTE0007288_Cd151_6
  gRNA
gagtggcacattcacatatg

SEQ ID NO: 136510 - DNA, 20 bp, Artificial Sequence
  mmSKRIPTE0007289_Cd151_7
  gRNA
atcctgggcctagaggaacg

SEQ ID NO: 136511 - DNA, 20 bp, Artificial Sequence
  mmSKRIPTE0007290_Cd151_8
  gRNA
cgagtggatccgctctggtg

SEQ ID NO: 136512 - DNA, 20 bp, Artificial Sequence
  mmSKRIPTE0007291_Cd151_9
  gRNA
cctgttacgcttggtcagtg

SEQ ID NO: 136513 - DNA, 20 bp, Artificial Sequence
  mmSKRIPTE0007292_Cdc37_1
  gRNA
tgacatcgcgcactgcactg

SEQ ID NO: 136514 - DNA, 20 bp, Artificial Sequence
  mmSKRIPTE0007293_Cdc37_2
  gRNA
acctgggcatgagatatatg

SEQ ID NO: 136515 - DNA, 20 bp, Artificial Sequence
  mmSKRIPTE0007294_Cdc37_3
  gRNA
tggcgtcgctaagtgcatca

SEQ ID NO: 136516 - DNA, 20 bp, Artificial Sequence
  mmSKRIPTE0007295_Cdc37_4
  gRNA
ataagatgttcccctagcag

SEQ ID NO: 136517 - DNA, 20 bp, Artificial Sequence
  mmSKRIPTE0007296_Cdc37_5
  gRNA
gggattcgtagacctccacg

SEQ ID NO: 136518 - DNA, 20 bp, Artificial Sequence
  mmSKRIPTE0007297_Cdc37_6
  gRNA
tcggcggcattggcaaccgg

SEQ ID NO: 136519 - DNA, 20 bp, Artificial Sequence
  mmSKRIPTE0007298_Cdc37_7
  gRNA
ataccctctgatctgcccga

SEQ ID NO: 136520 - DNA, 20 bp, Artificial Sequence
  mmSKRIPTE0007299_Cdc37_8
  gRNA
accagcggatgggtagcacg

SEQ ID NO: 136521 - DNA, 20 bp, Artificial Sequence
  mmSKRIPTE0007300_Cdc37_9
  gRNA
catatgtacggccatccccg

SEQ ID NO: 136522 - DNA, 20 bp, Artificial Sequence
  mmSKRIPTE0007301_Rhoa_1
  gRNA
aggcagttacactctaggtg

SEQ ID NO: 136523 - DNA, 20 bp, Artificial Sequence
  mmSKRIPTE0007302_Rhoa_2
  gRNA
aggtgagtacaagtcccgcg

SEQ ID NO: 136524 - DNA, 20 bp, Artificial Sequence
  mmSKRIPTE0007303_Rhoa_3
  gRNA
agtggcaggctaccccagcg

SEQ ID NO: 136525 - DNA, 20 bp, Artificial Sequence
  mmSKRIPTE0007304_Rhoa_4
  gRNA
cagcctgaagctttaacccg

SEQ ID NO: 136526 - DNA, 20 bp, Artificial Sequence
  mmSKRIPTE0007305_Rhoa_5
  gRNA
aaacgaacttggttacagtc

SEQ ID NO: 136527 - DNA, 20 bp, Artificial Sequence
  mmSKRIPTE0007306_Rhoa_6
  gRNA
gaaaggttgtagctgtgtcg

SEQ ID NO: 136528 - DNA, 20 bp, Artificial Sequence
  mmSKRIPTE0007307_Rhoa_7
  gRNA
tgatcccagcactgttccgg

SEQ ID NO: 136529 - DNA, 20 bp, Artificial Sequence
  mmSKRIPTE0007308_Rhoa_8
  gRNA
gatgctagtagtatcccgct

SEQ ID NO: 136530 - DNA, 20 bp, Artificial Sequence
  mmSKRIPTE0007309_Rhoa_9
  gRNA
tagcggttatgactctatgg

SEQ ID NO: 136531 - DNA, 20 bp, Artificial Sequence
  mmSKRIPTE0007310_Ccnd3_1
  gRNA
gtggacgaattacagcgcta

SEQ ID NO: 136532 - DNA, 20 bp, Artificial Sequence
  mmSKRIPTE0007311_Ccnd3_2
  gRNA
tgcacttccgagttgcacac

SEQ ID NO: 136533 - DNA, 20 bp, Artificial Sequence
  mmSKRIPTE0007312_Ccnd3_3
  gRNA
tggttcctgtgtctatcgcg

SEQ ID NO: 136534 - DNA, 20 bp, Artificial Sequence
  mmSKRIPTE0007313_Ccnd3_4
  gRNA
gggcgtacaatcatagttgg

SEQ ID NO: 136535 - DNA, 20 bp, Artificial Sequence
  mmSKRIPTE0007314_Ccnd3_5
  gRNA
gaccggcatcattatcacat

SEQ ID NO: 136536 - DNA, 20 bp, Artificial Sequence
  mmSKRIPTE0007315_Ccnd3_6
  gRNA
gagacctggatgcgatgttg

SEQ ID NO: 136537 - DNA, 20 bp, Artificial Sequence
  mmSKRIPTE0007316_Ccnd3_7
  gRNA
gccccaaacccgtcatcccg

SEQ ID NO: 136538 - DNA, 20 bp, Artificial Sequence
  mmSKRIPTE0007317_Ccnd3_8
  gRNA
ccaagtgaaacacggcagcg

SEQ ID NO: 136539 - DNA, 20 bp, Artificial Sequence
  mmSKRIPTE0007318_Ccnd3_9
  gRNA
ggagtcagcagtcggccgag

SEQ ID NO: 136540 - DNA, 20 bp, Artificial Sequence
  mmSKRIPTE0007319_Cfc1_1
  gRNA
gcactgaataggcttgtatg

SEQ ID NO: 136541 - DNA, 20 bp, Artificial Sequence
  mmSKRIPTE0007320_Cfc1_2
  gRNA
gagagtctatcatcgcactt

SEQ ID NO: 136542 - DNA, 20 bp, Artificial Sequence
  mmSKRIPTE0007321_Cfc1_3
  gRNA
gctattgcgagcacgaccag

SEQ ID NO: 136543 - DNA, 20 bp, Artificial Sequence
  mmSKRIPTE0007322_Cfc1_4
  gRNA
ttccgatcgttgtgaatcgg

SEQ ID NO: 136544 - DNA, 20 bp, Artificial Sequence
  mmSKRIPTE0007323_Cfc1_5
  gRNA
ctcaaatatcctagccccgg

SEQ ID NO: 136545 - DNA, 20 bp, Artificial Sequence
  mmSKRIPTE0007324_Cfc1_6
  gRNA
gctttcttgctggcacactg

SEQ ID NO: 136546 - DNA, 20 bp, Artificial Sequence
  mmSKRIPTE0007325_Cfc1_7
  gRNA
gctatagtgattccaagacc

SEQ ID NO: 136547 - DNA, 20 bp, Artificial Sequence
  mmSKRIPTE0007326_Cfc1_8
  gRNA
atacagggactgcacctgca

SEQ ID NO: 136548 - DNA, 20 bp, Artificial Sequence
  mmSKRIPTE0007327_Cfc1_9
  gRNA
gaaagaatgacattccggag

SEQ ID NO: 136549 - DNA, 20 bp, Artificial Sequence
  mmSKRIPTE0007328_Nr1d1_1
  gRNA
ttctggggccgaatatacgt

SEQ ID NO: 136550 - DNA, 20 bp, Artificial Sequence
  mmSKRIPTE0007329_Nr1d1_2
  gRNA
aatcctgattgcgaactgcg

SEQ ID NO: 136551 - DNA, 20 bp, Artificial Sequence
  mmSKRIPTE0007330_Nr1d1_3
  gRNA
aaactctaccacctcccgaa

SEQ ID NO: 136552 - DNA, 20 bp, Artificial Sequence
  mmSKRIPTE0007331_Nr1d1_4
  gRNA
agagttcgattctgtacaag

SEQ ID NO: 136553 - DNA, 20 bp, Artificial Sequence
  mmSKRIPTE0007332_Nr1d1_5
  gRNA
aaaagtgcttgctggcagcg

SEQ ID NO: 136554 - DNA, 20 bp, Artificial Sequence
  mmSKRIPTE0007333_Nr1d1_6
  gRNA
gcgcacagatctcaacgtgc

SEQ ID NO: 136555 - DNA, 20 bp, Artificial Sequence
  mmSKRIPTE0007334_Nr1d1_7
  gRNA
gcgctgaatggtctacgcca

SEQ ID NO: 136556 - DNA, 20 bp, Artificial Sequence
  mmSKRIPTE0007335_Nr1d1_8
  gRNA
cctgccaacagtctacggca

SEQ ID NO: 136557 - DNA, 20 bp, Artificial Sequence
  mmSKRIPTE0007336_Nr1d1_9
  gRNA
acagacgactatttctgccc

SEQ ID NO: 136558 - DNA, 20 bp, Artificial Sequence
  mmSKRIPTE0007337_Msh3_1
  gRNA
ctgcacactgcaatgccccg

SEQ ID NO: 136559 - DNA, 20 bp, Artificial Sequence
  mmSKRIPTE0007338_Msh3_2
  gRNA
tttgtggcagtatcacgatg

SEQ ID NO: 136560 - DNA, 20 bp, Artificial Sequence
  mmSKRIPTE0007339_Msh3_3
  gRNA
taaaacgatattctggcacg

SEQ ID NO: 136561 - DNA, 20 bp, Artificial Sequence
  mmSKRIPTE0007340_Msh3_4
  gRNA
tacacaaatagaatgcgcgg

SEQ ID NO: 136562 - DNA, 20 bp, Artificial Sequence
  mmSKRIPTE0007341_Msh3_5
  gRNA
gaaggtaaagtacggctccg

SEQ ID NO: 136563 - DNA, 20 bp, Artificial Sequence
  mmSKRIPTE0007342_Msh3_6
  gRNA
tcgggaggctctactgccgc

SEQ ID NO: 136564 - DNA, 20 bp, Artificial Sequence
  mmSKRIPTE0007343_Msh3_7
  gRNA
ttctatcgtggtgaatggcg

SEQ ID NO: 136565 - DNA, 20 bp, Artificial Sequence
  mmSKRIPTE0007344_Msh3_8
  gRNA
tctgcaacgtgcaaagaatg

SEQ ID NO: 136566 - DNA, 20 bp, Artificial Sequence
  mmSKRIPTE0007345_Msh3_9
  gRNA
tcaaatctattaccgctggt

SEQ ID NO: 136567 - DNA, 20 bp, Artificial Sequence
  mmSKRIPTE0007346_Nckap1l_1
  gRNA
cattgcgtagcagaacgtaa

SEQ ID NO: 136568 - DNA, 20 bp, Artificial Sequence
  mmSKRIPTE0007347_Nckap1l_2
  gRNA
gtttcctagactcagactcg

SEQ ID NO: 136569 - DNA, 20 bp, Artificial Sequence
  mmSKRIPTE0007348_Nckap1l_3
  gRNA
aatagtgatgaaggtcggag

SEQ ID NO: 136570 - DNA, 20 bp, Artificial Sequence
  mmSKRIPTE0007349_Nckap1l_4
  gRNA
gtagccagccaaagtcacga

SEQ ID NO: 136571 - DNA, 20 bp, Artificial Sequence
  mmSKRIPTE0007350_Nckap1l_5
  gRNA
gaagcagcagagctcttacg

SEQ ID NO: 136572 - DNA, 20 bp, Artificial Sequence
  mmSKRIPTE0007351_Nckap1l_6
  gRNA
gcagggttaatcatggccgg

SEQ ID NO: 136573 - DNA, 20 bp, Artificial Sequence
  mmSKRIPTE0007352_Nckap1l_7
  gRNA
cagatcagatggtagccctg

SEQ ID NO: 136574 - DNA, 20 bp, Artificial Sequence
  mmSKRIPTE0007353_Nckap1l_8
  gRNA
caggtgagggtactatggag

SEQ ID NO: 136575 - DNA, 20 bp, Artificial Sequence
  mmSKRIPTE0007354_Nckap1l_9
  gRNA
ctcacgatcctgaatgaccg

SEQ ID NO: 136576 - DNA, 20 bp, Artificial Sequence
  mmSKRIPTE0007355_Esrra_1
  gRNA
atagggtgttagccccaaag

SEQ ID NO: 136577 - DNA, 20 bp, Artificial Sequence
  mmSKRIPTE0007356_Esrra_2
  gRNA
agccccctatggcttccgcg

SEQ ID NO: 136578 - DNA, 20 bp, Artificial Sequence
  mmSKRIPTE0007357_Esrra_3
  gRNA
tggcttctaggctaaatcca

SEQ ID NO: 136579 - DNA, 20 bp, Artificial Sequence
  mmSKRIPTE0007358_Esrra_4
  gRNA
gacggcagaagtacaaacgg

SEQ ID NO: 136580 - DNA, 20 bp, Artificial Sequence
  mmSKRIPTE0007359_Esrra_5
  gRNA
gttgcccaacctatgtggca

SEQ ID NO: 136581 - DNA, 20 bp, Artificial Sequence
  mmSKRIPTE0007360_Esrra_6
  gRNA
ggtgtgcgcaggttaatggg

SEQ ID NO: 136582 - DNA, 20 bp, Artificial Sequence
  mmSKRIPTE0007361_Esrra_7
  gRNA
cgatggacacctccccgctg

SEQ ID NO: 136583 - DNA, 20 bp, Artificial Sequence
  mmSKRIPTE0007362_Esrra_8
  gRNA
gagactcccttacaagagtg

SEQ ID NO: 136584 - DNA, 20 bp, Artificial Sequence
  mmSKRIPTE0007363_Esrra_9
  gRNA
gcctgcgcatgcaaaacagg

SEQ ID NO: 136585 - DNA, 20 bp, Artificial Sequence
  mmSKRIPTE0007364_Edn3_1
  gRNA
aggcgcgggtctgtgttgcg

SEQ ID NO: 136586 - DNA, 20 bp, Artificial Sequence
  mmSKRIPTE0007365_Edn3_2
  gRNA
ccgggttcaaaggcccagcg

SEQ ID NO: 136587 - DNA, 20 bp, Artificial Sequence
  mmSKRIPTE0007366_Edn3_3
  gRNA
gacaggatacattcattccg

SEQ ID NO: 136588 - DNA, 20 bp, Artificial Sequence
  mmSKRIPTE0007367_Edn3_4
  gRNA
acaagttgggaattggcctg

SEQ ID NO: 136589 - DNA, 20 bp, Artificial Sequence
  mmSKRIPTE0007368_Edn3_5
  gRNA
tagatccagctaaggccggt

SEQ ID NO: 136590 - DNA, 20 bp, Artificial Sequence
  mmSKRIPTE0007369_Edn3_6
  gRNA
catcttagcatgggacggca

SEQ ID NO: 136591 - DNA, 20 bp, Artificial Sequence
  mmSKRIPTE0007370_Edn3_7
  gRNA
tcctgagtgagttggcctag

SEQ ID NO: 136592 - DNA, 20 bp, Artificial Sequence
  mmSKRIPTE0007371_Edn3_8
  gRNA
gcttgcgttgtacttgtatg

SEQ ID NO: 136593 - DNA, 20 bp, Artificial Sequence
  mmSKRIPTE0007372_Edn3_9
  gRNA
gccttcacaaaagtggctag

SEQ ID NO: 136594 - DNA, 20 bp, Artificial Sequence
  mmSKRIPTE0007373_Fgb_1
  gRNA
gcacggcacagatgatggtg

SEQ ID NO: 136595 - DNA, 20 bp, Artificial Sequence
  mmSKRIPTE0007374_Fgb_2
  gRNA
acgacggctggtaagcacca

SEQ ID NO: 136596 - DNA, 20 bp, Artificial Sequence
  mmSKRIPTE0007375_Fgb_3
  gRNA
gtcatacagaaccgtcagga

SEQ ID NO: 136597 - DNA, 20 bp, Artificial Sequence
  mmSKRIPTE0007376_Fgb_4
  gRNA
tcgggcaagatcgcagtgca

SEQ ID NO: 136598 - DNA, 20 bp, Artificial Sequence
  mmSKRIPTE0007377_Fgb_5
  gRNA
gaagacagcctcctgcatcg

SEQ ID NO: 136599 - DNA, 20 bp, Artificial Sequence
  mmSKRIPTE0007378_Fgb_6
  gRNA
acaccttcatgcatgcatcg

SEQ ID NO: 136600 - DNA, 20 bp, Artificial Sequence
  mmSKRIPTE0007379_Fgb_7
  gRNA
aatgcgattgtctagcactg

SEQ ID NO: 136601 - DNA, 20 bp, Artificial Sequence
  mmSKRIPTE0007380_Fgb_8
  gRNA
tacgtaaggagttcgggatg

SEQ ID NO: 136602 - DNA, 20 bp, Artificial Sequence
  mmSKRIPTE0007381_Fgb_9
  gRNA
ccattcctgaagtcatgccg

SEQ ID NO: 136603 - DNA, 20 bp, Artificial Sequence
  mmSKRIPTE0007382_Ntrk1_1
  gRNA
actaatgagaccatgcggca

SEQ ID NO: 136604 - DNA, 20 bp, Artificial Sequence
  mmSKRIPTE0007383_Ntrk1_2
  gRNA
gcggaggccactcttcacga

SEQ ID NO: 136605 - DNA, 20 bp, Artificial Sequence
  mmSKRIPTE0007384_Ntrk1_3
  gRNA
ctgccacccagggtacggag

SEQ ID NO: 136606 - DNA, 20 bp, Artificial Sequence
  mmSKRIPTE0007385_Ntrk1_4
  gRNA
acactcgatcgcctgcgcca

SEQ ID NO: 136607 - DNA, 20 bp, Artificial Sequence
  mmSKRIPTE0007386_Ntrk1_5
  gRNA
atttgggatcaaccgtgagt

SEQ ID NO: 136608 - DNA, 20 bp, Artificial Sequence
  mmSKRIPTE0007387_Ntrk1_6
  gRNA
ctgggtcagagtaaggtcgc

SEQ ID NO: 136609 - DNA, 20 bp, Artificial Sequence
  mmSKRIPTE0007388_Ntrk1_7
  gRNA
catcagactgcctagccccg

SEQ ID NO: 136610 - DNA, 20 bp, Artificial Sequence
  mmSKRIPTE0007389_Ntrk1_8
  gRNA
ctgtgagtgtgtgtcgttcg

SEQ ID NO: 136611 - DNA, 20 bp, Artificial Sequence
  mmSKRIPTE0007390_Ntrk1_9
  gRNA
gcgagaaggagactgcggca

SEQ ID NO: 136612 - DNA, 20 bp, Artificial Sequence
  mmSKRIPTE0007391_Hmgb1_1
  gRNA
caaacactaggcactcgacg

SEQ ID NO: 136613 - DNA, 20 bp, Artificial Sequence
  mmSKRIPTE0007392_Hmgb1_2
  gRNA
cgtagtgatatactgtgcaa

SEQ ID NO: 136614 - DNA, 20 bp, Artificial Sequence
  mmSKRIPTE0007393_Hmgb1_3
  gRNA
tcataagctcatactcacgg

SEQ ID NO: 136615 - DNA, 20 bp, Artificial Sequence
  mmSKRIPTE0007394_Hmgb1_4
  gRNA
ccatagccaattcctagaag

SEQ ID NO: 136616 - DNA, 20 bp, Artificial Sequence
  mmSKRIPTE0007395_Hmgb1_5
  gRNA
gtaaactttaggtgcacgag

SEQ ID NO: 136617 - DNA, 20 bp, Artificial Sequence
  mmSKRIPTE0007396_Hmgb1_6
  gRNA
tagtatgtatccaaatttgg

SEQ ID NO: 136618 - DNA, 20 bp, Artificial Sequence
  mmSKRIPTE0007397_Hmgb1_7
  gRNA
gcttgggtcgtgtatttgag

SEQ ID NO: 136619 - DNA, 20 bp, Artificial Sequence
  mmSKRIPTE0007398_Hmgb1_8
  gRNA
cagagcagaaacgcatctcg

SEQ ID NO: 136620 - DNA, 20 bp, Artificial Sequence
  mmSKRIPTE0007399_Hmgb1_9
  gRNA
tactcggagaaacttcagac

SEQ ID NO: 136621 - DNA, 20 bp, Artificial Sequence
  mmSKRIPTE0007400_Snca_1
  gRNA
tcacaggcacctataatgcg

SEQ ID NO: 136622 - DNA, 20 bp, Artificial Sequence
  mmSKRIPTE0007401_Snca_2
  gRNA
tcaaatgagtaccttaacca

SEQ ID NO: 136623 - DNA, 20 bp, Artificial Sequence
  mmSKRIPTE0007402_Snca_3
  gRNA
gagggccctctgaactcgag

SEQ ID NO: 136624 - DNA, 20 bp, Artificial Sequence
  mmSKRIPTE0007403_Snca_4
  gRNA
ccctaaggcagtcgaccctg

SEQ ID NO: 136625 - DNA, 20 bp, Artificial Sequence
  mmSKRIPTE0007404_Snca_5
  gRNA
cctctaaaagtgcagagcga

SEQ ID NO: 136626 - DNA, 20 bp, Artificial Sequence
  mmSKRIPTE0007405_Snca_6
  gRNA
acatgtcttaaggaaccgag

SEQ ID NO: 136627 - DNA, 20 bp, Artificial Sequence
  mmSKRIPTE0007406_Snca_7
  gRNA
acactgtgactaatgaattg

SEQ ID NO: 136628 - DNA, 20 bp, Artificial Sequence
  mmSKRIPTE0007407_Snca_8
  gRNA
agagagatctgatagtggca

SEQ ID NO: 136629 - DNA, 20 bp, Artificial Sequence
  mmSKRIPTE0007408_Snca_9
  gRNA
tgtgaaacgtcatcttccag

SEQ ID NO: 136630 - DNA, 20 bp, Artificial Sequence
  mmSKRIPTE0007409_Mitf_1
  gRNA
gttggtaacgctccccagtg

SEQ ID NO: 136631 - DNA, 20 bp, Artificial Sequence
  mmSKRIPTE0007410_Mitf_2
  gRNA
agtttcgtgaaattaagcag

SEQ ID NO: 136632 - DNA, 20 bp, Artificial Sequence
  mmSKRIPTE0007411_Mitf_3
  gRNA
caccagtagatctaggacag

SEQ ID NO: 136633 - DNA, 20 bp, Artificial Sequence
  mmSKRIPTE0007412_Mitf_4
  gRNA
agtccattgctaagggcgag

SEQ ID NO: 136634 - DNA, 20 bp, Artificial Sequence
  mmSKRIPTE0007413_Mitf_5
  gRNA
gagtacctagctccttaatg

SEQ ID NO: 136635 - DNA, 20 bp, Artificial Sequence
  mmSKRIPTE0007414_Mitf_6
  gRNA
tttatcacagagacatgcgg

SEQ ID NO: 136636 - DNA, 20 bp, Artificial Sequence
  mmSKRIPTE0007415_Mitf_7
  gRNA
gagagtgcgtgttcatacct

SEQ ID NO: 136637 - DNA, 20 bp, Artificial Sequence
  mmSKRIPTE0007416_Mitf_8
  gRNA
ggaccaagaacgtcctttag

SEQ ID NO: 136638 - DNA, 20 bp, Artificial Sequence
  mmSKRIPTE0007417_Mitf_9
  gRNA
tgggtgttgactgactgcag

SEQ ID NO: 136639 - DNA, 20 bp, Artificial Sequence
  mmSKRIPTE0007418_Tarm1_1
  gRNA
cagttgcggtgggaaagtcg

SEQ ID NO: 136640 - DNA, 20 bp, Artificial Sequence
  mmSKRIPTE0007419_Tarm1_2
  gRNA
acgcaaactttacgggtccg

SEQ ID NO: 136641 - DNA, 20 bp, Artificial Sequence
  mmSKRIPTE0007420_Tarm1_3
  gRNA
ctgcagtcactgtaccccgg

SEQ ID NO: 136642 - DNA, 20 bp, Artificial Sequence
  mmSKRIPTE0007421_Tarm1_4
  gRNA
tcaacagcaaggttacctgt

SEQ ID NO: 136643 - DNA, 20 bp, Artificial Sequence
  mmSKRIPTE0007422_Tarm1_5
  gRNA
gccatcattctgtcgtaggt

SEQ ID NO: 136644 - DNA, 20 bp, Artificial Sequence
  mmSKRIPTE0007423_Tarm1_6
  gRNA
tctgtgtgatcaatactgag

SEQ ID NO: 136645 - DNA, 20 bp, Artificial Sequence
  mmSKRIPTE0007424_Tarm1_7
  gRNA
gtgaccatcacttgccgcag

SEQ ID NO: 136646 - DNA, 20 bp, Artificial Sequence
  mmSKRIPTE0007425_Tarm1_8
  gRNA
cctccgtaagttattcaggg

SEQ ID NO: 136647 - DNA, 20 bp, Artificial Sequence
  mmSKRIPTE0007426_Tarm1_9
  gRNA
atttgcgattgggtatcatg

SEQ ID NO: 136648 - DNA, 20 bp, Artificial Sequence
  mmSKRIPTE0007427_Cmtm3_1
  gRNA
cccgatccagagtccgcgca

SEQ ID NO: 136649 - DNA, 20 bp, Artificial Sequence
  mmSKRIPTE0007428_Cmtm3_2
  gRNA
gcagcgtccacggaacacgg

SEQ ID NO: 136650 - DNA, 20 bp, Artificial Sequence
  mmSKRIPTE0007429_Cmtm3_3
  gRNA
taccgggcttcacgcacccg

SEQ ID NO: 136651 - DNA, 20 bp, Artificial Sequence
  mmSKRIPTE0007430_Cmtm3_4
  gRNA
aggtgagtggccaatctgtg

SEQ ID NO: 136652 - DNA, 20 bp, Artificial Sequence
  mmSKRIPTE0007431_Cmtm3_5
  gRNA
gaccagatagcgccgctatg

SEQ ID NO: 136653 - DNA, 20 bp, Artificial Sequence
  mmSKRIPTE0007432_Cmtm3_6
  gRNA
ctctcaagattacactcccg

SEQ ID NO: 136654 - DNA, 20 bp, Artificial Sequence
  mmSKRIPTE0007433_Cmtm3_7
  gRNA
aatccgggaagaacacggct

SEQ ID NO: 136655 - DNA, 20 bp, Artificial Sequence
  mmSKRIPTE0007434_Cmtm3_8
  gRNA
ctgcgtagagaatggtcgga

SEQ ID NO: 136656 - DNA, 20 bp, Artificial Sequence
  mmSKRIPTE0007435_Cmtm3_9
  gRNA
ccatggacggacctgatggg

SEQ ID NO: 136657 - DNA, 20 bp, Artificial Sequence
  mmSKRIPTE0007436_Ecsit_1
  gRNA
gcgcgacccacctactcacg

SEQ ID NO: 136658 - DNA, 20 bp, Artificial Sequence
  mmSKRIPTE0007437_Ecsit_2
  gRNA
cccaacaccgaccaacggag

SEQ ID NO: 136659 - DNA, 20 bp, Artificial Sequence
  mmSKRIPTE0007438_Ecsit_3
  gRNA
agctcatttagtgggcccag

SEQ ID NO: 136660 - DNA, 20 bp, Artificial Sequence
  mmSKRIPTE0007439_Ecsit_4
  gRNA
gtgctcagagtacgtcacag

SEQ ID NO: 136661 - DNA, 20 bp, Artificial Sequence
  mmSKRIPTE0007440_Ecsit_5
  gRNA
actcgtaaccggaagctccg

SEQ ID NO: 136662 - DNA, 20 bp, Artificial Sequence
  mmSKRIPTE0007441_Ecsit_6
  gRNA
agcccatgcagaacatacga

SEQ ID NO: 136663 - DNA, 20 bp, Artificial Sequence
  mmSKRIPTE0007442_Ecsit_7
  gRNA
ccgtttcacagatgggaccg

SEQ ID NO: 136664 - DNA, 20 bp, Artificial Sequence
  mmSKRIPTE0007443_Ecsit_8
  gRNA
ctggagcagatggaacgaca

SEQ ID NO: 136665 - DNA, 20 bp, Artificial Sequence
  mmSKRIPTE0007444_Ecsit_9
  gRNA
tgcgtcacagacaagatgtg

SEQ ID NO: 136666 - DNA, 20 bp, Artificial Sequence
  mmSKRIPTE0007445_Srms_1
  gRNA
cgatgtacacaggttcaccg

SEQ ID NO: 136667 - DNA, 20 bp, Artificial Sequence
  mmSKRIPTE0007446_Srms_2
  gRNA
gtacttcagtgggatcagca

SEQ ID NO: 136668 - DNA, 20 bp, Artificial Sequence
  mmSKRIPTE0007447_Srms_3
  gRNA
gtagataaaaccgccgaagg

SEQ ID NO: 136669 - DNA, 20 bp, Artificial Sequence
  mmSKRIPTE0007448_Srms_4
  gRNA
tcatccccactaacagacgc

SEQ ID NO: 136670 - DNA, 20 bp, Artificial Sequence
  mmSKRIPTE0007449_Srms_5
  gRNA
cagaccaaccgtaagtacct

SEQ ID NO: 136671 - DNA, 20 bp, Artificial Sequence
  mmSKRIPTE0007450_Srms_6
  gRNA
gggactacatctttgcccaa

SEQ ID NO: 136672 - DNA, 20 bp, Artificial Sequence
  mmSKRIPTE0007451_Srms_7
  gRNA
acaatagtctatgcaagagg

SEQ ID NO: 136673 - DNA, 20 bp, Artificial Sequence
  mmSKRIPTE0007452_Srms_8
  gRNA
gaaggttatcaaatcaggtg

SEQ ID NO: 136674 - DNA, 20 bp, Artificial Sequence
  mmSKRIPTE0007453_Srms_9
  gRNA
gacacgaatctcaagcccag

SEQ ID NO: 136675 - DNA, 20 bp, Artificial Sequence
  mmSKRIPTE0007454_Ccl12_1
  gRNA
acttacatcacagcttcccg

SEQ ID NO: 136676 - DNA, 20 bp, Artificial Sequence
  mmSKRIPTE0007455_Ccl12_2
  gRNA
cctggtccagccaatacctg

SEQ ID NO: 136677 - DNA, 20 bp, Artificial Sequence
  mmSKRIPTE0007456_Ccl12_3
  gRNA
gtcaggtcccctactcacct

SEQ ID NO: 136678 - DNA, 20 bp, Artificial Sequence
  mmSKRIPTE0007457_Ccl12_4
  gRNA
taaatatcacactgcccgtg

SEQ ID NO: 136679 - DNA, 20 bp, Artificial Sequence
  mmSKRIPTE0007458_Ccl12_5
  gRNA
tggtgtcacgaaacatcaca

SEQ ID NO: 136680 - DNA, 20 bp, Artificial Sequence
  mmSKRIPTE0007459_Ccl12_6
  gRNA
gcttactcagcatagtcctg

SEQ ID NO: 136681 - DNA, 20 bp, Artificial Sequence
  mmSKRIPTE0007460_Ccl12_7
  gRNA
ctgagaggaaatcacccctg

SEQ ID NO: 136682 - DNA, 20 bp, Artificial Sequence
  mmSKRIPTE0007461_Ccl12_8
  gRNA
ttagacagcgaaacagatgg

SEQ ID NO: 136683 - DNA, 20 bp, Artificial Sequence
  mmSKRIPTE0007462_Ccl12_9
  gRNA
tttgagacgtcttatccaag

SEQ ID NO: 136684 - DNA, 20 bp, Artificial Sequence
  mmSKRIPTE0007463_Hexim1_1
  gRNA
ccgatgacgctgcctcggag

SEQ ID NO: 136685 - DNA, 20 bp, Artificial Sequence
  mmSKRIPTE0007464_Hexim1_2
  gRNA
gccgagtgctcccacagacg

SEQ ID NO: 136686 - DNA, 20 bp, Artificial Sequence
  mmSKRIPTE0007465_Hexim1_3
  gRNA
tctatatataagaggcgccg

SEQ ID NO: 136687 - DNA, 20 bp, Artificial Sequence
  mmSKRIPTE0007466_Hexim1_4
  gRNA
gggttaagcgcacacaagcg

SEQ ID NO: 136688 - DNA, 20 bp, Artificial Sequence
  mmSKRIPTE0007467_Hexim1_5
  gRNA
acttctcggagacgtacgag

SEQ ID NO: 136689 - DNA, 20 bp, Artificial Sequence
  mmSKRIPTE0007468_Hexim1_6
  gRNA
tggacggctaccggactgca

SEQ ID NO: 136690 - DNA, 20 bp, Artificial Sequence
  mmSKRIPTE0007469_Hexim1_7
  gRNA
cgagccgagatgttcgccaa

SEQ ID NO: 136691 - DNA, 20 bp, Artificial Sequence
  mmSKRIPTE0007470_Hexim1_8
  gRNA
agcggagcatcgagccagag

SEQ ID NO: 136692 - DNA, 20 bp, Artificial Sequence
  mmSKRIPTE0007471_Hexim1_9
  gRNA
gagtttgctgacaggacgga

SEQ ID NO: 136693 - DNA, 20 bp, Artificial Sequence
  mmSKRIPTE0007472_Tigit_1
  gRNA
actcattagaggatctttcg

SEQ ID NO: 136694 - DNA, 20 bp, Artificial Sequence
  mmSKRIPTE0007473_Tigit_2
  gRNA
cctatcatacgtatcctggt

SEQ ID NO: 136695 - DNA, 20 bp, Artificial Sequence
  mmSKRIPTE0007474_Tigit_3
  gRNA
tgcaagccttacctgtagcg

SEQ ID NO: 136696 - DNA, 20 bp, Artificial Sequence
  mmSKRIPTE0007475_Tigit_4
  gRNA
gtgatgaacgtagaaccttg

SEQ ID NO: 136697 - DNA, 20 bp, Artificial Sequence
  mmSKRIPTE0007476_Tigit_5
  gRNA
aatcaatgatggtctctatg

SEQ ID NO: 136698 - DNA, 20 bp, Artificial Sequence
  mmSKRIPTE0007477_Tigit_6
  gRNA
ttcagtcttcagtgatcggg

SEQ ID NO: 136699 - DNA, 20 bp, Artificial Sequence
  mmSKRIPTE0007478_Tigit_7
  gRNA
agccatggttcctccaagcg

SEQ ID NO: 136700 - DNA, 20 bp, Artificial Sequence
  mmSKRIPTE0007479_Tigit_8
  gRNA
gctgtaaggtgaaaccaagc

SEQ ID NO: 136701 - DNA, 20 bp, Artificial Sequence
  mmSKRIPTE0007480_Tigit_9
  gRNA
agcgattgcctcttaccatg

SEQ ID NO: 136702 - DNA, 20 bp, Artificial Sequence
  mmSKRIPTE0007481_Fpr1_1
  gRNA
agaaggtaatcatcgtaccc

SEQ ID NO: 136703 - DNA, 20 bp, Artificial Sequence
  mmSKRIPTE0007482_Fpr1_2
  gRNA
gtaccacattaactgcacag

SEQ ID NO: 136704 - DNA, 20 bp, Artificial Sequence
  mmSKRIPTE0007483_Fpr1_3
  gRNA
ccacaatccaagtccgtgaa

SEQ ID NO: 136705 - DNA, 20 bp, Artificial Sequence
  mmSKRIPTE0007484_Fpr1_4
  gRNA
attgccagcatggtcatggg

SEQ ID NO: 136706 - DNA, 20 bp, Artificial Sequence
  mmSKRIPTE0007485_Fpr1_5
  gRNA
cggcctgtgagtgaactaag

SEQ ID NO: 136707 - DNA, 20 bp, Artificial Sequence
  mmSKRIPTE0007486_Fpr1_6
  gRNA
gtttccagaacaatccaacc

SEQ ID NO: 136708 - DNA, 20 bp, Artificial Sequence
  mmSKRIPTE0007487_Fpr1_7
  gRNA
cctaatagtagacttggacc

SEQ ID NO: 136709 - DNA, 20 bp, Artificial Sequence
  mmSKRIPTE0007488_Fpr1_8
  gRNA
caacgggctcgtgatctggg

SEQ ID NO: 136710 - DNA, 20 bp, Artificial Sequence
  mmSKRIPTE0007489_Fpr1_9
  gRNA
acaaaggagagaacccgcaa

SEQ ID NO: 136711 - DNA, 20 bp, Artificial Sequence
  mmSKRIPTE0007490_Lbp_1
  gRNA
tggcggtgtcaaccccggtg

SEQ ID NO: 136712 - DNA, 20 bp, Artificial Sequence
  mmSKRIPTE0007491_Lbp_2
  gRNA
cctgcatcacgggctattcg

SEQ ID NO: 136713 - DNA, 20 bp, Artificial Sequence
  mmSKRIPTE0007492_Lbp_3
  gRNA
gtcactcccaagaggtacgg

SEQ ID NO: 136714 - DNA, 20 bp, Artificial Sequence
  mmSKRIPTE0007493_Lbp_4
  gRNA
taaacttagtgagaccacgt

SEQ ID NO: 136715 - DNA, 20 bp, Artificial Sequence
  mmSKRIPTE0007494_Lbp_5
  gRNA
gagtctgctatacgggtatg

SEQ ID NO: 136716 - DNA, 20 bp, Artificial Sequence
  mmSKRIPTE0007495_Lbp_6
  gRNA
tggctagagaagctttctgc

SEQ ID NO: 136717 - DNA, 20 bp, Artificial Sequence
  mmSKRIPTE0007496_Lbp_7
  gRNA
ctgggggttgttataccatg

SEQ ID NO: 136718 - DNA, 20 bp, Artificial Sequence
  mmSKRIPTE0007497_Lbp_8
  gRNA
accctcttgcgacaccacag

SEQ ID NO: 136719 - DNA, 20 bp, Artificial Sequence
  mmSKRIPTE0007498_Lbp_9
  gRNA
tagattccacatcttctaag

SEQ ID NO: 136720 - DNA, 20 bp, Artificial Sequence
  mmSKRIPTE0007499_Mknk2_1
  gRNA
acatatgcccctgccccgcg

SEQ ID NO: 136721 - DNA, 20 bp, Artificial Sequence
  mmSKRIPTE0007500_Mknk2_2
  gRNA
agtcgtaagatagcacgtga

SEQ ID NO: 136722 - DNA, 20 bp, Artificial Sequence
  mmSKRIPTE0007501_Mknk2_3
  gRNA
gtctcataggatcgtcacag

SEQ ID NO: 136723 - DNA, 20 bp, Artificial Sequence
  mmSKRIPTE0007502_Mknk2_4
  gRNA
tgggtacctctaaagcaacc

SEQ ID NO: 136724 - DNA, 20 bp, Artificial Sequence
  mmSKRIPTE0007503_Mknk2_5
  gRNA
ctggtgtttgagaagatgcg

SEQ ID NO: 136725 - DNA, 20 bp, Artificial Sequence
  mmSKRIPTE0007504_Mknk2_6
  gRNA
cctgtgggcgatgcctagtg

SEQ ID NO: 136726 - DNA, 20 bp, Artificial Sequence
  mmSKRIPTE0007505_Mknk2_7
  gRNA
catctggaatgcgagtggag

SEQ ID NO: 136727 - DNA, 20 bp, Artificial Sequence
  mmSKRIPTE0007506_Mknk2_8
  gRNA
cgcctttactgccctcaccg

SEQ ID NO: 136728 - DNA, 20 bp, Artificial Sequence
  mmSKRIPTE0007507_Mknk2_9
  gRNA
gctgggagtagttcccaatg

SEQ ID NO: 136729 - DNA, 20 bp, Artificial Sequence
  mmSKRIPTE0007508_Nlrp3_1
  gRNA
gttctttatccactgccgag

SEQ ID NO: 136730 - DNA, 20 bp, Artificial Sequence
  mmSKRIPTE0007509_Nlrp3_2
  gRNA
cccccatagtgtgagcgtgt

SEQ ID NO: 136731 - DNA, 20 bp, Artificial Sequence
  mmSKRIPTE0007510_Nlrp3_3
  gRNA
cgataacgtgaaactgccag

SEQ ID NO: 136732 - DNA, 20 bp, Artificial Sequence
  mmSKRIPTE0007511_Nlrp3_4
  gRNA
cgtagcatcagcatccgaag

SEQ ID NO: 136733 - DNA, 20 bp, Artificial Sequence
  mmSKRIPTE0007512_Nlrp3_5
  gRNA
gaccagaacccatggtgacg

SEQ ID NO: 136734 - DNA, 20 bp, Artificial Sequence
  mmSKRIPTE0007513_Nlrp3_6
  gRNA
tgatcttggcgatctgtgcg

SEQ ID NO: 136735 - DNA, 20 bp, Artificial Sequence
  mmSKRIPTE0007514_Nlrp3_7
  gRNA
gtgttgtcaggatctcgcat

SEQ ID NO: 136736 - DNA, 20 bp, Artificial Sequence
  mmSKRIPTE0007515_Nlrp3_8
  gRNA
catgattgacttcaatggcg

SEQ ID NO: 136737 - DNA, 20 bp, Artificial Sequence
  mmSKRIPTE0007516_Nlrp3_9
  gRNA
caccatcaggatcacagccg

SEQ ID NO: 136738 - DNA, 20 bp, Artificial Sequence
  mmSKRIPTE0007517_Hoxb6_1
  gRNA
tgtgcgcagtcggacttgcg

SEQ ID NO: 136739 - DNA, 20 bp, Artificial Sequence
  mmSKRIPTE0007518_Hoxb6_2
  gRNA
cgaaataggaactcatcggg

SEQ ID NO: 136740 - DNA, 20 bp, Artificial Sequence
  mmSKRIPTE0007519_Hoxb6_3
  gRNA
gctccggacgtgaaatactt

SEQ ID NO: 136741 - DNA, 20 bp, Artificial Sequence
  mmSKRIPTE0007520_Hoxb6_4
  gRNA
ggggaaagactactcccgac

SEQ ID NO: 136742 - DNA, 20 bp, Artificial Sequence
  mmSKRIPTE0007521_Hoxb6_5
  gRNA
ctttacgtttgagggccgag

SEQ ID NO: 136743 - DNA, 20 bp, Artificial Sequence
  mmSKRIPTE0007522_Hoxb6_6
  gRNA
ggctatactactaataggcg

SEQ ID NO: 136744 - DNA, 20 bp, Artificial Sequence
  mmSKRIPTE0007523_Hoxb6_7
  gRNA
ggcgccggcccataatcaca

SEQ ID NO: 136745 - DNA, 20 bp, Artificial Sequence
  mmSKRIPTE0007524_Hoxb6_8
  gRNA
taccattgaaccgtgcacgg

SEQ ID NO: 136746 - DNA, 20 bp, Artificial Sequence
  mmSKRIPTE0007525_Hoxb6_9
  gRNA
aggccaaggtgggttcttcg

SEQ ID NO: 136747 - DNA, 20 bp, Artificial Sequence
  mmSKRIPTE0007526_Hif1a_1
  gRNA
agctagccggaggagcgcct

SEQ ID NO: 136748 - DNA, 20 bp, Artificial Sequence
  mmSKRIPTE0007527_Hif1a_2
  gRNA
cacagacaagcacgtgagcg

SEQ ID NO: 136749 - DNA, 20 bp, Artificial Sequence
  mmSKRIPTE0007528_Hif1a_3
  gRNA
agatggcgacgtggaccgcg

SEQ ID NO: 136750 - DNA, 20 bp, Artificial Sequence
  mmSKRIPTE0007529_Hif1a_4
  gRNA
catactgttactattaacgc

SEQ ID NO: 136751 - DNA, 20 bp, Artificial Sequence
  mmSKRIPTE0007530_Hif1a_5
  gRNA
agccagtccacggaacgcgg

SEQ ID NO: 136752 - DNA, 20 bp, Artificial Sequence
  mmSKRIPTE0007531_Hif1a_6
  gRNA
agtaagaaaatttcatatcg

SEQ ID NO: 136753 - DNA, 20 bp, Artificial Sequence
  mmSKRIPTE0007532_Hif1a_7
  gRNA
catcaagtcagcaacgtgga

SEQ ID NO: 136754 - DNA, 20 bp, Artificial Sequence
  mmSKRIPTE0007533_Hif1a_8
  gRNA
atcagcaccaagcacgtcat

SEQ ID NO: 136755 - DNA, 20 bp, Artificial Sequence
  mmSKRIPTE0007534_Hif1a_9
  gRNA
gatgctcaagaagaacatgt

SEQ ID NO: 136756 - DNA, 20 bp, Artificial Sequence
  mmSKRIPTE0007535_Igha_1
  gRNA
caacacgcttgtcaccaggt

SEQ ID NO: 136757 - DNA, 20 bp, Artificial Sequence
  mmSKRIPTE0007536_Igha_2
  gRNA
tcggtcttagctctgaaacg

SEQ ID NO: 136758 - DNA, 20 bp, Artificial Sequence
  mmSKRIPTE0007537_Igha_3
  gRNA
ctctggtaaagaacgttagg

SEQ ID NO: 136759 - DNA, 20 bp, Artificial Sequence
  mmSKRIPTE0007538_Igha_4
  gRNA
tggtgggtttacccgacaga

SEQ ID NO: 136760 - DNA, 20 bp, Artificial Sequence
  mmSKRIPTE0007539_Igha_5
  gRNA
agtcatcggtgatcaagact

SEQ ID NO: 136761 - DNA, 20 bp, Artificial Sequence
  mmSKRIPTE0007540_Igha_6
  gRNA
tcaggcagccgattatcact

SEQ ID NO: 136762 - DNA, 20 bp, Artificial Sequence
  mmSKRIPTE0007541_Igha_7
  gRNA
aggatcaggccttagtgacg

SEQ ID NO: 136763 - DNA, 20 bp, Artificial Sequence
  mmSKRIPTE0007542_Igha_8
  gRNA
tcacattcatcgtgccggaa

SEQ ID NO: 136764 - DNA, 20 bp, Artificial Sequence
  mmSKRIPTE0007543_Igha_9
  gRNA
gagctcgtgggagtgtcagt

SEQ ID NO: 136765 - DNA, 20 bp, Artificial Sequence
  mmSKRIPTE0007544_Thpo_1
  gRNA
gatagacaaagggtcgacgt

SEQ ID NO: 136766 - DNA, 20 bp, Artificial Sequence
  mmSKRIPTE0007545_Thpo_2
  gRNA
ggcttgtgaccctactacag

SEQ ID NO: 136767 - DNA, 20 bp, Artificial Sequence
  mmSKRIPTE0007546_Thpo_3
  gRNA
gttgttgcaagctcaagaag

SEQ ID NO: 136768 - DNA, 20 bp, Artificial Sequence
  mmSKRIPTE0007547_Thpo_4
  gRNA
gccaagcatagcccttgtca

SEQ ID NO: 136769 - DNA, 20 bp, Artificial Sequence
  mmSKRIPTE0007548_Thpo_5
  gRNA
atatggtgtagcatctacct

SEQ ID NO: 136770 - DNA, 20 bp, Artificial Sequence
  mmSKRIPTE0007549_Thpo_6
  gRNA
actctggggaacaagtaggt

SEQ ID NO: 136771 - DNA, 20 bp, Artificial Sequence
  mmSKRIPTE0007550_Thpo_7
  gRNA
tgagtggcaagcaccatttg

SEQ ID NO: 136772 - DNA, 20 bp, Artificial Sequence
  mmSKRIPTE0007551_Thpo_8
  gRNA
tcagaagaggcctgatatgt

SEQ ID NO: 136773 - DNA, 20 bp, Artificial Sequence
  mmSKRIPTE0007552_Thpo_9
  gRNA
agctccgggcgagatgtctg

SEQ ID NO: 136774 - DNA, 20 bp, Artificial Sequence
  mmSKRIPTE0007553_H2-Q2_1
  gRNA
aagggaaaccgattccaggt

SEQ ID NO: 136775 - DNA, 20 bp, Artificial Sequence
  mmSKRIPTE0007554_H2-Q2_2
  gRNA
ccagacggaagcctactccg

SEQ ID NO: 136776 - DNA, 20 bp, Artificial Sequence
  mmSKRIPTE0007555_H2-Q2_3
  gRNA
tggaggtcgattgcttgacg

SEQ ID NO: 136777 - DNA, 20 bp, Artificial Sequence
  mmSKRIPTE0007556_H2-Q2_4
  gRNA
agctgaccacgggatcccgt

SEQ ID NO: 136778 - DNA, 20 bp, Artificial Sequence
  mmSKRIPTE0007557_H2-Q2_5
  gRNA
aaggtatggtgggcgacgtg

SEQ ID NO: 136779 - DNA, 20 bp, Artificial Sequence
  mmSKRIPTE0007558_H2-Q2_6
  gRNA
gaaactgactgagacacgcg

SEQ ID NO: 136780 - DNA, 20 bp, Artificial Sequence
  mmSKRIPTE0007559_H2-Q2_7
  gRNA
gaaacagcgtctgcggagag

SEQ ID NO: 136781 - DNA, 20 bp, Artificial Sequence
  mmSKRIPTE0007560_H2-Q2_8
  gRNA
cagacggaagcctactccga

SEQ ID NO: 136782 - DNA, 20 bp, Artificial Sequence
  mmSKRIPTE0007561_H2-Q2_9
  gRNA
tataaagtccatgcagccaa

SEQ ID NO: 136783 - DNA, 20 bp, Artificial Sequence
  mmSKRIPTE0007562_Gm8909_1
  gRNA
agggtcttgtgagcgacacg

SEQ ID NO: 136784 - DNA, 20 bp, Artificial Sequence
  mmSKRIPTE0007563_Gm8909_2
  gRNA
gcagatcactcgacgcaggt

SEQ ID NO: 136785 - DNA, 20 bp, Artificial Sequence
  mmSKRIPTE0007564_Gm8909_3
  gRNA
gtgaaaggaaaaccggtccg

SEQ ID NO: 136786 - DNA, 20 bp, Artificial Sequence
  mmSKRIPTE0007565_Gm8909_4
  gRNA
ttcgccaggtcccgagacag

SEQ ID NO: 136787 - DNA, 20 bp, Artificial Sequence
  mmSKRIPTE0007566_Gm8909_5
  gRNA
gatactgacggagacacgcg

SEQ ID NO: 136788 - DNA, 20 bp, Artificial Sequence
  mmSKRIPTE0007567_Gm8909_6
  gRNA
aagcgaactgccagtacccg

SEQ ID NO: 136789 - DNA, 20 bp, Artificial Sequence
  mmSKRIPTE0007568_Gm8909_7
  gRNA
aagtcccaccactcatgcaa

SEQ ID NO: 136790 - DNA, 20 bp, Artificial Sequence
  mmSKRIPTE0007569_Gm8909_8
  gRNA
atgtgcagttctttagtgag

SEQ ID NO: 136791 - DNA, 20 bp, Artificial Sequence
  mmSKRIPTE0007570_Gm8909_9
  gRNA
ttggagtccctggatggacg

SEQ ID NO: 136792 - DNA, 20 bp, Artificial Sequence
  mmSKRIPTE0007571_Fzd8_1
  gRNA
acacgctcaccatgggcgcg

SEQ ID NO: 136793 - DNA, 20 bp, Artificial Sequence
  mmSKRIPTE0007572_Fzd8_2
  gRNA
acgtcagtaccggcctgacg

SEQ ID NO: 136794 - DNA, 20 bp, Artificial Sequence
  mmSKRIPTE0007573_Fzd8_3
  gRNA
aattagcttcgtcttgacag

SEQ ID NO: 136795 - DNA, 20 bp, Artificial Sequence
  mmSKRIPTE0007574_Fzd8_4
  gRNA
agcgctttaagtacccggaa

SEQ ID NO: 136796 - DNA, 20 bp, Artificial Sequence
  mmSKRIPTE0007575_Fzd8_5
  gRNA
tacaccgcagacttcatcca

SEQ ID NO: 136797 - DNA, 20 bp, Artificial Sequence
  mmSKRIPTE0007576_Fzd8_6
  gRNA
cagagccttgacaacctacg

SEQ ID NO: 136798 - DNA, 20 bp, Artificial Sequence
  mmSKRIPTE0007577_Fzd8_7
  gRNA
catgccctcatacaccctag

SEQ ID NO: 136799 - DNA, 20 bp, Artificial Sequence
  mmSKRIPTE0007578_Fzd8_8
  gRNA
tgacgcggttgtagagcggg

SEQ ID NO: 136800 - DNA, 20 bp, Artificial Sequence
  mmSKRIPTE0007579_Fzd8_9
  gRNA
gcggtgctacagcgctctag

SEQ ID NO: 136801 - DNA, 20 bp, Artificial Sequence
  mmSKRIPTE0007580_Mul1_1
  gRNA
aggtggttgcgacgttactg

SEQ ID NO: 136802 - DNA, 20 bp, Artificial Sequence
  mmSKRIPTE0007581_Mul1_2
  gRNA
aaggaactgaggccacatcg

SEQ ID NO: 136803 - DNA, 20 bp, Artificial Sequence
  mmSKRIPTE0007582_Mul1_3
  gRNA
aagaacgtctagaaacccgg

SEQ ID NO: 136804 - DNA, 20 bp, Artificial Sequence
  mmSKRIPTE0007583_Mul1_4
  gRNA
aataacgtccagtgacactg

SEQ ID NO: 136805 - DNA, 20 bp, Artificial Sequence
  mmSKRIPTE0007584_Mul1_5
  gRNA
cagacgacgcgcagccagag

SEQ ID NO: 136806 - DNA, 20 bp, Artificial Sequence
  mmSKRIPTE0007585_Mul1_6
  gRNA
ggtcgcaggtgatttcgagg

SEQ ID NO: 136807 - DNA, 20 bp, Artificial Sequence
  mmSKRIPTE0007586_Mul1_7
  gRNA
gtgaaggtgccactccacac

SEQ ID NO: 136808 - DNA, 20 bp, Artificial Sequence
  mmSKRIPTE0007587_Mul1_8
  gRNA
ttaacagcgacaagccagtg

SEQ ID NO: 136809 - DNA, 20 bp, Artificial Sequence
  mmSKRIPTE0007588_Mul1_9
  gRNA
ctactgctcgtcacacgctg

SEQ ID NO: 136810 - DNA, 20 bp, Artificial Sequence
  mmSKRIPTE0007589_Bmx_1
  gRNA
tccctatggagactgcacca

SEQ ID NO: 136811 - DNA, 20 bp, Artificial Sequence
  mmSKRIPTE0007590_Bmx_2
  gRNA
atgcagttatgttaagccgt

SEQ ID NO: 136812 - DNA, 20 bp, Artificial Sequence
  mmSKRIPTE0007591_Bmx_3
  gRNA
atatagcgtatgttgctggt

SEQ ID NO: 136813 - DNA, 20 bp, Artificial Sequence
  mmSKRIPTE0007592_Bmx_4
  gRNA
tcagaagattgcacttacgt

SEQ ID NO: 136814 - DNA, 20 bp, Artificial Sequence
  mmSKRIPTE0007593_Bmx_5
  gRNA
aacgtctggagggagactaa

SEQ ID NO: 136815 - DNA, 20 bp, Artificial Sequence
  mmSKRIPTE0007594_Bmx_6
  gRNA
ggatccctgtagtgcatccg

SEQ ID NO: 136816 - DNA, 20 bp, Artificial Sequence
  mmSKRIPTE0007595_Bmx_7
  gRNA
tgcaggccttagctgaacta

SEQ ID NO: 136817 - DNA, 20 bp, Artificial Sequence
  mmSKRIPTE0007596_Bmx_8
  gRNA
tctcagactttggaatgacg

SEQ ID NO: 136818 - DNA, 20 bp, Artificial Sequence
  mmSKRIPTE0007597_Bmx_9
  gRNA
ttcttggacagtattacctg

SEQ ID NO: 136819 - DNA, 20 bp, Artificial Sequence
  mmSKRIPTE0007598_Hspd1_1
  gRNA
agagtacatgtagcaatcgg

SEQ ID NO: 136820 - DNA, 20 bp, Artificial Sequence
  mmSKRIPTE0007599_Hspd1_2
  gRNA
ccaacggtgcttcaaaacat

SEQ ID NO: 136821 - DNA, 20 bp, Artificial Sequence
  mmSKRIPTE0007600_Hspd1_3
  gRNA
cacacgtgatgaaaccagcg

SEQ ID NO: 136822 - DNA, 20 bp, Artificial Sequence
  mmSKRIPTE0007601_Hspd1_4
  gRNA
caagtggcgtcatttccggg

SEQ ID NO: 136823 - DNA, 20 bp, Artificial Sequence
  mmSKRIPTE0007602_Hspd1_5
  gRNA
gaaggttctagaacggaccg

SEQ ID NO: 136824 - DNA, 20 bp, Artificial Sequence
  mmSKRIPTE0007603_Hspd1_6
  gRNA
ggtggcatctgttagtacca

SEQ ID NO: 136825 - DNA, 20 bp, Artificial Sequence
  mmSKRIPTE0007604_Hspd1_7
  gRNA
gtatcgtgatactggttctg

SEQ ID NO: 136826 - DNA, 20 bp, Artificial Sequence
  mmSKRIPTE0007605_Hspd1_8
  gRNA
gaggggactcgggctcattg

SEQ ID NO: 136827 - DNA, 20 bp, Artificial Sequence
  mmSKRIPTE0007606_Hspd1_9
  gRNA
tttcacccacgggacgcgcg

SEQ ID NO: 136828 - DNA, 20 bp, Artificial Sequence
  mmSKRIPTE0007607_Fzd7_1
  gRNA
aggaaaaagacgaggcgctg

SEQ ID NO: 136829 - DNA, 20 bp, Artificial Sequence
  mmSKRIPTE0007608_Fzd7_2
  gRNA
cgcaccgttacgtctcggcg

SEQ ID NO: 136830 - DNA, 20 bp, Artificial Sequence
  mmSKRIPTE0007609_Fzd7_3
  gRNA
gcacggaatccgaagcgccg

SEQ ID NO: 136831 - DNA, 20 bp, Artificial Sequence
  mmSKRIPTE0007610_Fzd7_4
  gRNA
gccgaccttcctaggactga

SEQ ID NO: 136832 - DNA, 20 bp, Artificial Sequence
  mmSKRIPTE0007611_Fzd7_5
  gRNA
atggaccggctagggcctaa

SEQ ID NO: 136833 - DNA, 20 bp, Artificial Sequence
  mmSKRIPTE0007612_Fzd7_6
  gRNA
ctcggacgatggctaccgca

SEQ ID NO: 136834 - DNA, 20 bp, Artificial Sequence
  mmSKRIPTE0007613_Fzd7_7
  gRNA
cttcacgctaggactctagc

SEQ ID NO: 136835 - DNA, 20 bp, Artificial Sequence
  mmSKRIPTE0007614_Fzd7_8
  gRNA
tgtcacatagtaccttagcg

SEQ ID NO: 136836 - DNA, 20 bp, Artificial Sequence
  mmSKRIPTE0007615_Fzd7_9
  gRNA
aaggcggagcagcaccaccg

SEQ ID NO: 136837 - DNA, 20 bp, Artificial Sequence
  mmSKRIPTE0007616_Irf1_1
  gRNA
gctaccaagaggccccgcag

SEQ ID NO: 136838 - DNA, 20 bp, Artificial Sequence
  mmSKRIPTE0007617_Irf1_2
  gRNA
gggtgcgtttagatgccaag

SEQ ID NO: 136839 - DNA, 20 bp, Artificial Sequence
  mmSKRIPTE0007618_Irf1_3
  gRNA
gccgtggaacaaaaggcgca

SEQ ID NO: 136840 - DNA, 20 bp, Artificial Sequence
  mmSKRIPTE0007619_Irf1_4
  gRNA
ggccaacctcctaccatgag

SEQ ID NO: 136841 - DNA, 20 bp, Artificial Sequence
  mmSKRIPTE0007620_Irf1_5
  gRNA
ctttgcatattacatccggg

SEQ ID NO: 136842 - DNA, 20 bp, Artificial Sequence
  mmSKRIPTE0007621_Irf1_6
  gRNA
aaggctgtataagtaaggaa

SEQ ID NO: 136843 - DNA, 20 bp, Artificial Sequence
  mmSKRIPTE0007622_Irf1_7
  gRNA
ctttgtatcggcctacagga

SEQ ID NO: 136844 - DNA, 20 bp, Artificial Sequence
  mmSKRIPTE0007623_Irf1_8
  gRNA
cctagaagcctcttacctcg

SEQ ID NO: 136845 - DNA, 20 bp, Artificial Sequence
  mmSKRIPTE0007624_Irf1_9
  gRNA
aagcccagtagttcacgacc

SEQ ID NO: 136846 - DNA, 20 bp, Artificial Sequence
  mmSKRIPTE0007625_Cdk13_1
  gRNA
cgttagtgactactaaacgg

SEQ ID NO: 136847 - DNA, 20 bp, Artificial Sequence
  mmSKRIPTE0007626_Cdk13_2
  gRNA
aagcattcagtacgactgtg

SEQ ID NO: 136848 - DNA, 20 bp, Artificial Sequence
  mmSKRIPTE0007627_Cdk13_3
  gRNA
cacagttacatagcaaacga

SEQ ID NO: 136849 - DNA, 20 bp, Artificial Sequence
  mmSKRIPTE0007628_Cdk13_4
  gRNA
tgactgggggaaacgctgcg

SEQ ID NO: 136850 - DNA, 20 bp, Artificial Sequence
  mmSKRIPTE0007629_Cdk13_5
  gRNA
aggtaatggcggtaacgtag

SEQ ID NO: 136851 - DNA, 20 bp, Artificial Sequence
  mmSKRIPTE0007630_Cdk13_6
  gRNA
tggatcgaataactgaagag

SEQ ID NO: 136852 - DNA, 20 bp, Artificial Sequence
  mmSKRIPTE0007631_Cdk13_7
  gRNA
tctttgatttcaccatagcg

SEQ ID NO: 136853 - DNA, 20 bp, Artificial Sequence
  mmSKRIPTE0007632_Cdk13_8
  gRNA
ataagtcgagtgcagctgcg

SEQ ID NO: 136854 - DNA, 20 bp, Artificial Sequence
  mmSKRIPTE0007633_Cdk13_9
  gRNA
tagtcgcccatatactaaca

SEQ ID NO: 136855 - DNA, 20 bp, Artificial Sequence
  mmSKRIPTE0007634_Rab3c_1
  gRNA
gcgaagaataggttgtcgaa

SEQ ID NO: 136856 - DNA, 20 bp, Artificial Sequence
  mmSKRIPTE0007635_Rab3c_2
  gRNA
cgggttgtctcaaccgagag

SEQ ID NO: 136857 - DNA, 20 bp, Artificial Sequence
  mmSKRIPTE0007636_Rab3c_3
  gRNA
agctggaggggctagcccga

SEQ ID NO: 136858 - DNA, 20 bp, Artificial Sequence
  mmSKRIPTE0007637_Rab3c_4
  gRNA
tttgcctacaatgagacacg

SEQ ID NO: 136859 - DNA, 20 bp, Artificial Sequence
  mmSKRIPTE0007638_Rab3c_5
  gRNA
taaaggaatcgtcggcataa

SEQ ID NO: 136860 - DNA, 20 bp, Artificial Sequence
  mmSKRIPTE0007639_Rab3c_6
  gRNA
cacgcgtgcggagtgttgcg

SEQ ID NO: 136861 - DNA, 20 bp, Artificial Sequence
  mmSKRIPTE0007640_Rab3c_7
  gRNA
atggtctcggagaaactgag

SEQ ID NO: 136862 - DNA, 20 bp, Artificial Sequence
  mmSKRIPTE0007641_Rab3c_8
  gRNA
aaatccttgtaagaatctga

SEQ ID NO: 136863 - DNA, 20 bp, Artificial Sequence
  mmSKRIPTE0007642_Rab3c_9
  gRNA
ccttggctcagggcacaagt

SEQ ID NO: 136864 - DNA, 20 bp, Artificial Sequence
  mmSKRIPTE0007643_Pou1f1_1
  gRNA
gcaaatatagatcaccagtg

SEQ ID NO: 136865 - DNA, 20 bp, Artificial Sequence
  mmSKRIPTE0007644_Pou1f1_2
  gRNA
tagtaagttaaggatcgcaa

SEQ ID NO: 136866 - DNA, 20 bp, Artificial Sequence
  mmSKRIPTE0007645_Pou1f1_3
  gRNA
agaaagaagtagtacgagtg

SEQ ID NO: 136867 - DNA, 20 bp, Artificial Sequence
  mmSKRIPTE0007646_Pou1f1_4
  gRNA
gactggtaagaaaatgtacg

SEQ ID NO: 136868 - DNA, 20 bp, Artificial Sequence
  mmSKRIPTE0007647_Pou1f1_5
  gRNA
acttggaggacacgcatgag

SEQ ID NO: 136869 - DNA, 20 bp, Artificial Sequence
  mmSKRIPTE0007648_Pou1f1_6
  gRNA
ttcctatcaacccttctcag

SEQ ID NO: 136870 - DNA, 20 bp, Artificial Sequence
  mmSKRIPTE0007649_Pou1f1_7
  gRNA
cgtgcagatcagtagcacag

SEQ ID NO: 136871 - DNA, 20 bp, Artificial Sequence
  mmSKRIPTE0007650_Pou1f1_8
  gRNA
agaaggtgggagcaaacgaa

SEQ ID NO: 136872 - DNA, 20 bp, Artificial Sequence
  mmSKRIPTE0007651_Pou1f1_9
  gRNA
catccttagcagctacactg

SEQ ID NO: 136873 - DNA, 20 bp, Artificial Sequence
  mmSKRIPTE0007652_Ttbk1_1
  gRNA
actgtggcatctcgacaaca

SEQ ID NO: 136874 - DNA, 20 bp, Artificial Sequence
  mmSKRIPTE0007653_Ttbk1_2
  gRNA
gagcattgaccgaggcgtag

SEQ ID NO: 136875 - DNA, 20 bp, Artificial Sequence
  mmSKRIPTE0007654_Ttbk1_3
  gRNA
tcagctgcaatctgtcgctg

SEQ ID NO: 136876 - DNA, 20 bp, Artificial Sequence
  mmSKRIPTE0007655_Ttbk1_4
  gRNA
caagcatacaaataagctcg

SEQ ID NO: 136877 - DNA, 20 bp, Artificial Sequence
  mmSKRIPTE0007656_Ttbk1_5
  gRNA
gtgaggtccccacagctgcg

SEQ ID NO: 136878 - DNA, 20 bp, Artificial Sequence
  mmSKRIPTE0007657_Ttbk1_6
  gRNA
tcagtggagaacgcaatcag

SEQ ID NO: 136879 - DNA, 20 bp, Artificial Sequence
  mmSKRIPTE0007658_Ttbk1_7
  gRNA
cgtccttaagagctgccgct

SEQ ID NO: 136880 - DNA, 20 bp, Artificial Sequence
  mmSKRIPTE0007659_Ttbk1_8
  gRNA
gagcacgctgtggatgtcgg

SEQ ID NO: 136881 - DNA, 20 bp, Artificial Sequence
  mmSKRIPTE0007660_Ttbk1_9
  gRNA
atgtgacaagagtccacggg

SEQ ID NO: 136882 - DNA, 20 bp, Artificial Sequence
  mmSKRIPTE0007661_Trbc2_1
  gRNA
tcagagtcaaggtgtcaacg

SEQ ID NO: 136883 - DNA, 20 bp, Artificial Sequence
  mmSKRIPTE0007662_Trbc2_2
  gRNA
atggccatggtaagaatggt

SEQ ID NO: 136884 - DNA, 20 bp, Artificial Sequence
  mmSKRIPTE0007663_Trbc2_3
  gRNA
tggatataaagggatctcag

SEQ ID NO: 136885 - DNA, 20 bp, Artificial Sequence
  mmSKRIPTE0007664_Trbc2_4
  gRNA
ttggaggatctaaagtacac

SEQ ID NO: 136886 - DNA, 20 bp, Artificial Sequence
  mmSKRIPTE0007665_Trbc2_5
  gRNA
caaatatcctatagacatga

SEQ ID NO: 136887 - DNA, 20 bp, Artificial Sequence
  mmSKRIPTE0007666_Trbc2_6
  gRNA
aacagcatcctatcatcagg

SEQ ID NO: 136888 - DNA, 20 bp, Artificial Sequence
  mmSKRIPTE0007667_Trbc2_7
  gRNA
atcctctggaaagtaaagag

SEQ ID NO: 136889 - DNA, 20 bp, Artificial Sequence
  mmSKRIPTE0007668_Trbc2_8
  gRNA
aggtaagtgcggagctcatg

SEQ ID NO: 136890 - DNA, 20 bp, Artificial Sequence
  mmSKRIPTE0007669_Trbc2_9
  gRNA
tctatggccagggtgaagaa

SEQ ID NO: 136891 - DNA, 20 bp, Artificial Sequence
  mmSKRIPTE0007670_Fes_1
  gRNA
tgagcctgaagaccgcatca

SEQ ID NO: 136892 - DNA, 20 bp, Artificial Sequence
  mmSKRIPTE0007671_Fes_2
  gRNA
tgagcagctgtggtaccacg

SEQ ID NO: 136893 - DNA, 20 bp, Artificial Sequence
  mmSKRIPTE0007672_Fes_3
  gRNA
cttaagggcagtgaatcgga

SEQ ID NO: 136894 - DNA, 20 bp, Artificial Sequence
  mmSKRIPTE0007673_Fes_4
  gRNA
agctcgttcaaggtgagcag

SEQ ID NO: 136895 - DNA, 20 bp, Artificial Sequence
  mmSKRIPTE0007674_Fes_5
  gRNA
attgcaggggaacttcggag

SEQ ID NO: 136896 - DNA, 20 bp, Artificial Sequence
  mmSKRIPTE0007675_Fes_6
  gRNA
acacgtgggtagcgtgacag

SEQ ID NO: 136897 - DNA, 20 bp, Artificial Sequence
  mmSKRIPTE0007676_Fes_7
  gRNA
ccttcgtgcagacaataccc

SEQ ID NO: 136898 - DNA, 20 bp, Artificial Sequence
  mmSKRIPTE0007677_Fes_8
  gRNA
aatagcgactaccaacccct

SEQ ID NO: 136899 - DNA, 20 bp, Artificial Sequence
  mmSKRIPTE0007678_Fes_9
  gRNA
gcgacaagcctgtctacaca

SEQ ID NO: 136900 - DNA, 20 bp, Artificial Sequence
  mmSKRIPTE0007679_Prkx_1
  gRNA
cctattgttactcacccgcg

SEQ ID NO: 136901 - DNA, 20 bp, Artificial Sequence
  mmSKRIPTE0007680_Prkx_2
  gRNA
tgggacaccatagccaccgt

SEQ ID NO: 136902 - DNA, 20 bp, Artificial Sequence
  mmSKRIPTE0007681_Prkx_3
  gRNA
ccgtcggttacgcaacaagg

SEQ ID NO: 136903 - DNA, 20 bp, Artificial Sequence
  mmSKRIPTE0007682_Prkx_4
  gRNA
ccgagaccttggtcttcacg

SEQ ID NO: 136904 - DNA, 20 bp, Artificial Sequence
  mmSKRIPTE0007683_Prkx_5
  gRNA
agacacaacagagtgcacga

SEQ ID NO: 136905 - DNA, 20 bp, Artificial Sequence
  mmSKRIPTE0007684_Prkx_6
  gRNA
tcggccacgattacgcaggt

SEQ ID NO: 136906 - DNA, 20 bp, Artificial Sequence
  mmSKRIPTE0007685_Prkx_7
  gRNA
ctcccaagagtgcgatgtag

SEQ ID NO: 136907 - DNA, 20 bp, Artificial Sequence
  mmSKRIPTE0007686_Prkx_8
  gRNA
acttcaccttagggactcgg

SEQ ID NO: 136908 - DNA, 20 bp, Artificial Sequence
  mmSKRIPTE0007687_Prkx_9
  gRNA
atggacatcatgccaatctg

SEQ ID NO: 136909 - DNA, 20 bp, Artificial Sequence
  mmSKRIPTE0007688_Cactin_1
  gRNA
ccaagtgtcacccattggcg

SEQ ID NO: 136910 - DNA, 20 bp, Artificial Sequence
  mmSKRIPTE0007689_Cactin_2
  gRNA
cgggacgccgttagaactag

SEQ ID NO: 136911 - DNA, 20 bp, Artificial Sequence
  mmSKRIPTE0007690_Cactin_3
  gRNA
tgtcttaacgggactccccg

SEQ ID NO: 136912 - DNA, 20 bp, Artificial Sequence
  mmSKRIPTE0007691_Cactin_4
  gRNA
ttcaaccggggaaccccgtg

SEQ ID NO: 136913 - DNA, 20 bp, Artificial Sequence
  mmSKRIPTE0007692_Cactin_5
  gRNA
cgtgtgccgtgagcagccgt

SEQ ID NO: 136914 - DNA, 20 bp, Artificial Sequence
  mmSKRIPTE0007693_Cactin_6
  gRNA
gtgtctcctaaggagcctca

SEQ ID NO: 136915 - DNA, 20 bp, Artificial Sequence
  mmSKRIPTE0007694_Cactin_7
  gRNA
tcccacaggtcagattcgga

SEQ ID NO: 136916 - DNA, 20 bp, Artificial Sequence
  mmSKRIPTE0007695_Cactin_8
  gRNA
aggcctccttcagaagccgt

SEQ ID NO: 136917 - DNA, 20 bp, Artificial Sequence
  mmSKRIPTE0007696_Cactin_9
  gRNA
caagatcgtcagtcgtgagt

SEQ ID NO: 136918 - DNA, 20 bp, Artificial Sequence
  mmSKRIPTE0007697_Aimp1_1
  gRNA
aggtttctctgccgattctg

SEQ ID NO: 136919 - DNA, 20 bp, Artificial Sequence
  mmSKRIPTE0007698_Aimp1_2
  gRNA
gctatggagaggacccgggt

SEQ ID NO: 136920 - DNA, 20 bp, Artificial Sequence
  mmSKRIPTE0007699_Aimp1_3
  gRNA
tgaatcaaaagggggcacgt

SEQ ID NO: 136921 - DNA, 20 bp, Artificial Sequence
  mmSKRIPTE0007700_Aimp1_4
  gRNA
acgttacaggactaacaccc

SEQ ID NO: 136922 - DNA, 20 bp, Artificial Sequence
  mmSKRIPTE0007701_Aimp1_5
  gRNA
ctagccgagaggcaacgact

SEQ ID NO: 136923 - DNA, 20 bp, Artificial Sequence
  mmSKRIPTE0007702_Aimp1_6
  gRNA
tgaatgttgacgccattgag

SEQ ID NO: 136924 - DNA, 20 bp, Artificial Sequence
  mmSKRIPTE0007703_Aimp1_7
  gRNA
tccagacgcgatgcgtcgat

SEQ ID NO: 136925 - DNA, 20 bp, Artificial Sequence
  mmSKRIPTE0007704_Aimp1_8
  gRNA
atgtggcgttatgctcactg

SEQ ID NO: 136926 - DNA, 20 bp, Artificial Sequence
  mmSKRIPTE0007705_Aimp1_9
  gRNA
ggcaatgaatacgtggccga

SEQ ID NO: 136927 - DNA, 20 bp, Artificial Sequence
  mmSKRIPTE0007706_Tcf7_1
  gRNA
gtttgtttagaaccacccta

SEQ ID NO: 136928 - DNA, 20 bp, Artificial Sequence
  mmSKRIPTE0007707_Tcf7_2
  gRNA
gctcaggcactgaaacgttg

SEQ ID NO: 136929 - DNA, 20 bp, Artificial Sequence
  mmSKRIPTE0007708_Tcf7_3
  gRNA
tatacccgggctggtccgcg

SEQ ID NO: 136930 - DNA, 20 bp, Artificial Sequence
  mmSKRIPTE0007709_Tcf7_4
  gRNA
cttgcccagttaacatccag

SEQ ID NO: 136931 - DNA, 20 bp, Artificial Sequence
  mmSKRIPTE0007710_Tcf7_5
  gRNA
gctgtctgggcctagcaatg

SEQ ID NO: 136932 - DNA, 20 bp, Artificial Sequence
  mmSKRIPTE0007711_Tcf7_6
  gRNA
tgcaaaccacgtgtgcaggt

SEQ ID NO: 136933 - DNA, 20 bp, Artificial Sequence
  mmSKRIPTE0007712_Tcf7_7
  gRNA
gcttcggtcacttaccagcg

SEQ ID NO: 136934 - DNA, 20 bp, Artificial Sequence
  mmSKRIPTE0007713_Tcf7_8
  gRNA
cctctagtaaaaggaagcgg

SEQ ID NO: 136935 - DNA, 20 bp, Artificial Sequence
  mmSKRIPTE0007714_Tcf7_9
  gRNA
aggtagccagccccattaca

SEQ ID NO: 136936 - DNA, 20 bp, Artificial Sequence
  mmSKRIPTE0007715_Il25_1
  gRNA
tggccctgcaggattctgcg

SEQ ID NO: 136937 - DNA, 20 bp, Artificial Sequence
  mmSKRIPTE0007716_Il25_2
  gRNA
tactcaggaacggactccaa

SEQ ID NO: 136938 - DNA, 20 bp, Artificial Sequence
  mmSKRIPTE0007717_Il25_3
  gRNA
accagacggtcttctaccgg

SEQ ID NO: 136939 - DNA, 20 bp, Artificial Sequence
  mmSKRIPTE0007718_Il25_4
  gRNA
atgttctcatggatccccca

SEQ ID NO: 136940 - DNA, 20 bp, Artificial Sequence
  mmSKRIPTE0007719_Il25_5
  gRNA
caaagagcaagaacccccgg

SEQ ID NO: 136941 - DNA, 20 bp, Artificial Sequence
  mmSKRIPTE0007720_Il25_6
  gRNA
ccaatgagaaagctactcgc

SEQ ID NO: 136942 - DNA, 20 bp, Artificial Sequence
  mmSKRIPTE0007721_Il25_7
  gRNA
cgtcagcttgcggatccagg

SEQ ID NO: 136943 - DNA, 20 bp, Artificial Sequence
  mmSKRIPTE0007722_Il25_8
  gRNA
gatgggtaccttcctcgcca

SEQ ID NO: 136944 - DNA, 20 bp, Artificial Sequence
  mmSKRIPTE0007723_Il25_9
  gRNA
catgactaagccatgacccg

SEQ ID NO: 136945 - DNA, 20 bp, Artificial Sequence
  mmSKRIPTE0007724_Pf4_1
  gRNA
tcttgacatgagcgtcgctg

SEQ ID NO: 136946 - DNA, 20 bp, Artificial Sequence
  mmSKRIPTE0007725_Pf4_2
  gRNA
agcatcgccttcccctcgga

SEQ ID NO: 136947 - DNA, 20 bp, Artificial Sequence
  mmSKRIPTE0007726_Pf4_3
  gRNA
gacatcgggtcatattgtat

SEQ ID NO: 136948 - DNA, 20 bp, Artificial Sequence
  mmSKRIPTE0007727_Pf4_4
  gRNA
tgagctggggaaccgcacag

SEQ ID NO: 136949 - DNA, 20 bp, Artificial Sequence
  mmSKRIPTE0007728_Pf4_5
  gRNA
ctggtgacagcaaccaccgc

SEQ ID NO: 136950 - DNA, 20 bp, Artificial Sequence
  mmSKRIPTE0007729_Pf4_6
  gRNA
ggaccagctgagggtaaacg

SEQ ID NO: 136951 - DNA, 20 bp, Artificial Sequence
  mmSKRIPTE0007730_Pf4_7
  gRNA
gaccctatcatctgccggtg

SEQ ID NO: 136952 - DNA, 20 bp, Artificial Sequence
  mmSKRIPTE0007731_Pf4_8
  gRNA
gaggtgaactctgatgacat

SEQ ID NO: 136953 - DNA, 20 bp, Artificial Sequence
  mmSKRIPTE0007732_Pf4_9
  gRNA
gtgcttaagatggatcccag

SEQ ID NO: 136954 - DNA, 20 bp, Artificial Sequence
  mmSKRIPTE0007733_Map2k2_1
  gRNA
gggaatgggatacctcccga

SEQ ID NO: 136955 - DNA, 20 bp, Artificial Sequence
  mmSKRIPTE0007734_Map2k2_2
  gRNA
gaaacaccacagacgtcaag

SEQ ID NO: 136956 - DNA, 20 bp, Artificial Sequence
  mmSKRIPTE0007735_Map2k2_3
  gRNA
tggtgcctgaagtggtacag

SEQ ID NO: 136957 - DNA, 20 bp, Artificial Sequence
  mmSKRIPTE0007736_Map2k2_4
  gRNA
ctgtcaagtaggtcatggga

SEQ ID NO: 136958 - DNA, 20 bp, Artificial Sequence
  mmSKRIPTE0007737_Map2k2_5
  gRNA
cttcctccgggccagcatcg

SEQ ID NO: 136959 - DNA, 20 bp, Artificial Sequence
  mmSKRIPTE0007738_Map2k2_6
  gRNA
tatcaaccctaccatcgccg

SEQ ID NO: 136960 - DNA, 20 bp, Artificial Sequence
  mmSKRIPTE0007739_Map2k2_7
  gRNA
aaccccatagtgtctccccg

SEQ ID NO: 136961 - DNA, 20 bp, Artificial Sequence
  mmSKRIPTE0007740_Map2k2_8
  gRNA
aggtcagcattgcggtaagt

SEQ ID NO: 136962 - DNA, 20 bp, Artificial Sequence
  mmSKRIPTE0007741_Map2k2_9
  gRNA
ccccacccactagatagtgt

SEQ ID NO: 136963 - DNA, 20 bp, Artificial Sequence
  mmSKRIPTE0007742_Il5_1
  gRNA
ctcttggtccagatggacgc

SEQ ID NO: 136964 - DNA, 20 bp, Artificial Sequence
  mmSKRIPTE0007743_Il5_2
  gRNA
tgtcaacagagctcggtgag

SEQ ID NO: 136965 - DNA, 20 bp, Artificial Sequence
  mmSKRIPTE0007744_Il5_3
  gRNA
ccagtcagagcggtatagca

SEQ ID NO: 136966 - DNA, 20 bp, Artificial Sequence
  mmSKRIPTE0007745_Il5_4
  gRNA
actctgtactcatcacacca

SEQ ID NO: 136967 - DNA, 20 bp, Artificial Sequence
  mmSKRIPTE0007746_Il5_5
  gRNA
gagaccctgatgcaacgaag

SEQ ID NO: 136968 - DNA, 20 bp, Artificial Sequence
  mmSKRIPTE0007747_Il5_6
  gRNA
aggagcaggaagccccggtg

SEQ ID NO: 136969 - DNA, 20 bp, Artificial Sequence
  mmSKRIPTE0007748_Il5_7
  gRNA
aagaaccatagcgtcaggca

SEQ ID NO: 136970 - DNA, 20 bp, Artificial Sequence
  mmSKRIPTE0007749_Il5_8
  gRNA
ggtatcgggagcaagaacaa

SEQ ID NO: 136971 - DNA, 20 bp, Artificial Sequence
  mmSKRIPTE0007750_Il5_9
  gRNA
atgtgttagtgttaatgcac

SEQ ID NO: 136972 - DNA, 20 bp, Artificial Sequence
  mmSKRIPTE0007751_Ccl6_1
  gRNA
ttcagattcatagaactacg

SEQ ID NO: 136973 - DNA, 20 bp, Artificial Sequence
  mmSKRIPTE0007752_Ccl6_2
  gRNA
tctgtgccgaccccagcgat

SEQ ID NO: 136974 - DNA, 20 bp, Artificial Sequence
  mmSKRIPTE0007753_Ccl6_3
  gRNA
ttgtggcagggcgaacaact

SEQ ID NO: 136975 - DNA, 20 bp, Artificial Sequence
  mmSKRIPTE0007754_Ccl6_4
  gRNA
atggctctaaccgtgtcagg

SEQ ID NO: 136976 - DNA, 20 bp, Artificial Sequence
  mmSKRIPTE0007755_Ccl6_5
  gRNA
ctcctagcttataaatacca

SEQ ID NO: 136977 - DNA, 20 bp, Artificial Sequence
  mmSKRIPTE0007756_Ccl6_6
  gRNA
cttgagccctctcaacccag

SEQ ID NO: 136978 - DNA, 20 bp, Artificial Sequence
  mmSKRIPTE0007757_Ccl6_7
  gRNA
tggtcccgaagggagtatgg

SEQ ID NO: 136979 - DNA, 20 bp, Artificial Sequence
  mmSKRIPTE0007758_Ccl6_8
  gRNA
catggagtggactttattgg

SEQ ID NO: 136980 - DNA, 20 bp, Artificial Sequence
  mmSKRIPTE0007759_Ccl6_9
  gRNA
tgttcaccaaaacctaaggg

SEQ ID NO: 136981 - DNA, 20 bp, Artificial Sequence
  mmSKRIPTE0007760_Klf11_1
  gRNA
tgcaagagtgtggttcgaag

SEQ ID NO: 136982 - DNA, 20 bp, Artificial Sequence
  mmSKRIPTE0007761_Klf11_2
  gRNA
gacatggtacccgagccatg

SEQ ID NO: 136983 - DNA, 20 bp, Artificial Sequence
  mmSKRIPTE0007762_Klf11_3
  gRNA
cgccctcttacactactacc

SEQ ID NO: 136984 - DNA, 20 bp, Artificial Sequence
  mmSKRIPTE0007763_Klf11_4
  gRNA
ttacgacggaatgaggagca

SEQ ID NO: 136985 - DNA, 20 bp, Artificial Sequence
  mmSKRIPTE0007764_Klf11_5
  gRNA
agctcacggagccgtcaaca

SEQ ID NO: 136986 - DNA, 20 bp, Artificial Sequence
  mmSKRIPTE0007765_Klf11_6
  gRNA
tttgtgcacattcggctctg

SEQ ID NO: 136987 - DNA, 20 bp, Artificial Sequence
  mmSKRIPTE0007766_Klf11_7
  gRNA
atgacgtcacccgaatccag

SEQ ID NO: 136988 - DNA, 20 bp, Artificial Sequence
  mmSKRIPTE0007767_Klf11_8
  gRNA
cagtgtgatccgtcacaccg

SEQ ID NO: 136989 - DNA, 20 bp, Artificial Sequence
  mmSKRIPTE0007768_Klf11_9
  gRNA
atgcagaacacccgctcacg

SEQ ID NO: 136990 - DNA, 20 bp, Artificial Sequence
  mmSKRIPTE0007769_Hfe_1
  gRNA
ggtttgctccaagatccacg

SEQ ID NO: 136991 - DNA, 20 bp, Artificial Sequence
  mmSKRIPTE0007770_Hfe_2
  gRNA
ataaccacagtaagggtacg

SEQ ID NO: 136992 - DNA, 20 bp, Artificial Sequence
  mmSKRIPTE0007771_Hfe_3
  gRNA
ttcactaggatctggaaacg

SEQ ID NO: 136993 - DNA, 20 bp, Artificial Sequence
  mmSKRIPTE0007772_Hfe_4
  gRNA
cgagaaggtgctacctaacg

SEQ ID NO: 136994 - DNA, 20 bp, Artificial Sequence
  mmSKRIPTE0007773_Hfe_5
  gRNA
tccaagtatcgagtgatctg

SEQ ID NO: 136995 - DNA, 20 bp, Artificial Sequence
  mmSKRIPTE0007774_Hfe_6
  gRNA
aatgaatagcatgctcaggg

SEQ ID NO: 136996 - DNA, 20 bp, Artificial Sequence
  mmSKRIPTE0007775_Hfe_7
  gRNA
aggagcgtaatgaagtatca

SEQ ID NO: 136997 - DNA, 20 bp, Artificial Sequence
  mmSKRIPTE0007776_Hfe_8
  gRNA
ttcctcccgcactcacgcgg

SEQ ID NO: 136998 - DNA, 20 bp, Artificial Sequence
  mmSKRIPTE0007777_Hfe_9
  gRNA
ccttcgaagagagaaacacc

SEQ ID NO: 136999 - DNA, 20 bp, Artificial Sequence
  mmSKRIPTE0007778_Il9_1
  gRNA
tccctccctgtagcacggtg

SEQ ID NO: 137000 - DNA, 20 bp, Artificial Sequence
  mmSKRIPTE0007779_Il9_2
  gRNA
gctcccggtgttgcataggt

SEQ ID NO: 137001 - DNA, 20 bp, Artificial Sequence
  mmSKRIPTE0007780_Il9_3
  gRNA
tatagtcggaaaaaggtcag

SEQ ID NO: 137002 - DNA, 20 bp, Artificial Sequence
  mmSKRIPTE0007781_Il9_4
  gRNA
tttcaggaagaatcgccaag

SEQ ID NO: 137003 - DNA, 20 bp, Artificial Sequence
  mmSKRIPTE0007782_Il9_5
  gRNA
atctggaataaagatccacg

SEQ ID NO: 137004 - DNA, 20 bp, Artificial Sequence
  mmSKRIPTE0007783_Il9_6
  gRNA
gaaataagaaggttgatcct

SEQ ID NO: 137005 - DNA, 20 bp, Artificial Sequence
  mmSKRIPTE0007784_Il9_7
  gRNA
acggtggatcatcctacagt

SEQ ID NO: 137006 - DNA, 20 bp, Artificial Sequence
  mmSKRIPTE0007785_Il9_8
  gRNA
cttaagatagtttcctcggg

SEQ ID NO: 137007 - DNA, 20 bp, Artificial Sequence
  mmSKRIPTE0007786_Il9_9
  gRNA
gtcaggcaaaaaatgtaacc

SEQ ID NO: 137008 - DNA, 20 bp, Artificial Sequence
  mmSKRIPTE0007787_Pla2g10_1
  gRNA
agaggaccgcagtaactatg

SEQ ID NO: 137009 - DNA, 20 bp, Artificial Sequence
  mmSKRIPTE0007788_Pla2g10_2
  gRNA
gcagtggtaccttaccacaa

SEQ ID NO: 137010 - DNA, 20 bp, Artificial Sequence
  mmSKRIPTE0007789_Pla2g10_3
  gRNA
agcattattgcccgtcacag

SEQ ID NO: 137011 - DNA, 20 bp, Artificial Sequence
  mmSKRIPTE0007790_Pla2g10_4
  gRNA
aggattaaagaatcaccaag

SEQ ID NO: 137012 - DNA, 20 bp, Artificial Sequence
  mmSKRIPTE0007791_Pla2g10_5
  gRNA
ttgtgcaggagagtcaccgg

SEQ ID NO: 137013 - DNA, 20 bp, Artificial Sequence
  mmSKRIPTE0007792_Pla2g10_6
  gRNA
tgaacaacctaaaagtccat

SEQ ID NO: 137014 - DNA, 20 bp, Artificial Sequence
  mmSKRIPTE0007793_Pla2g10_7
  gRNA
caccagtcaatggcgtcacg

SEQ ID NO: 137015 - DNA, 20 bp, Artificial Sequence
  mmSKRIPTE0007794_Pla2g10_8
  gRNA
ttagaggcactggcccaaga

SEQ ID NO: 137016 - DNA, 20 bp, Artificial Sequence
  mmSKRIPTE0007795_Pla2g10_9
  gRNA
tctgtacccaggtaaggccg

SEQ ID NO: 137017 - DNA, 20 bp, Artificial Sequence
  mmSKRIPTE0007796_Mx1_1
  gRNA
tatatggaaaggcaccccga

SEQ ID NO: 137018 - DNA, 20 bp, Artificial Sequence
  mmSKRIPTE0007797_Mx1_2
  gRNA
accaaacacaggtatcacct

SEQ ID NO: 137019 - DNA, 20 bp, Artificial Sequence
  mmSKRIPTE0007798_Mx1_3
  gRNA
agtacactgaataccacacg

SEQ ID NO: 137020 - DNA, 20 bp, Artificial Sequence
  mmSKRIPTE0007799_Mx1_4
  gRNA
accagaagccgacccttctg

SEQ ID NO: 137021 - DNA, 20 bp, Artificial Sequence
  mmSKRIPTE0007800_Mx1_5
  gRNA
tgatcaccaactctacggag

SEQ ID NO: 137022 - DNA, 20 bp, Artificial Sequence
  mmSKRIPTE0007801_Mx1_6
  gRNA
ttcacagaatcctagatgag

SEQ ID NO: 137023 - DNA, 20 bp, Artificial Sequence
  mmSKRIPTE0007802_Mx1_7
  gRNA
tccacccttcctgatagggg

SEQ ID NO: 137024 - DNA, 20 bp, Artificial Sequence
  mmSKRIPTE0007803_Mx1_8
  gRNA
tctcaatggctgatctacag

SEQ ID NO: 137025 - DNA, 20 bp, Artificial Sequence
  mmSKRIPTE0007804_Mx1_9
  gRNA
gtgagaaacatcactctcac

SEQ ID NO: 137026 - DNA, 20 bp, Artificial Sequence
  mmSKRIPTE0007805_H2-M2_1
  gRNA
gacatcgcagtgtcaagacc

SEQ ID NO: 137027 - DNA, 20 bp, Artificial Sequence
  mmSKRIPTE0007806_H2-M2_2
  gRNA
aaggtgacctagcctagggt

SEQ ID NO: 137028 - DNA, 20 bp, Artificial Sequence
  mmSKRIPTE0007807_H2-M2_3
  gRNA
cagtggctactcttgtcatg

SEQ ID NO: 137029 - DNA, 20 bp, Artificial Sequence
  mmSKRIPTE0007808_H2-M2_4
  gRNA
cagaacagtgagtaaccctg

SEQ ID NO: 137030 - DNA, 20 bp, Artificial Sequence
  mmSKRIPTE0007809_H2-M2_5
  gRNA
ctactgcgcacaggtacgag

SEQ ID NO: 137031 - DNA, 20 bp, Artificial Sequence
  mmSKRIPTE0007810_H2-M2_6
  gRNA
tgtcgaagtaccgcaaggag

SEQ ID NO: 137032 - DNA, 20 bp, Artificial Sequence
  mmSKRIPTE0007811_H2-M2_7
  gRNA
tcctcattatatagtcacca

SEQ ID NO: 137033 - DNA, 20 bp, Artificial Sequence
  mmSKRIPTE0007812_H2-M2_8
  gRNA
atagccaacagtcatgtagt

SEQ ID NO: 137034 - DNA, 20 bp, Artificial Sequence
  mmSKRIPTE0007813_H2-M2_9
  gRNA
acctgccctggatccccatg

SEQ ID NO: 137035 - DNA, 20 bp, Artificial Sequence
  mmSKRIPTE0007814_Nbl1_1
  gRNA
accggccagactttcgagca

SEQ ID NO: 137036 - DNA, 20 bp, Artificial Sequence
  mmSKRIPTE0007815_Nbl1_2
  gRNA
tgcgggtcgccggagcaaag

SEQ ID NO: 137037 - DNA, 20 bp, Artificial Sequence
  mmSKRIPTE0007816_Nbl1_3
  gRNA
gaggtgcagtatagcctcgg

SEQ ID NO: 137038 - DNA, 20 bp, Artificial Sequence
  mmSKRIPTE0007817_Nbl1_4
  gRNA
agggaccaggatagatccag

SEQ ID NO: 137039 - DNA, 20 bp, Artificial Sequence
  mmSKRIPTE0007818_Nbl1_5
  gRNA
cgccgggctgcgtaacacga

SEQ ID NO: 137040 - DNA, 20 bp, Artificial Sequence
  mmSKRIPTE0007819_Nbl1_6
  gRNA
cctttgctgaaggacctatg

SEQ ID NO: 137041 - DNA, 20 bp, Artificial Sequence
  mmSKRIPTE0007820_Nbl1_7
  gRNA
catctctctagaaggccgaa

SEQ ID NO: 137042 - DNA, 20 bp, Artificial Sequence
  mmSKRIPTE0007821_Nbl1_8
  gRNA
aaagtgaaaatcgaggcgag

SEQ ID NO: 137043 - DNA, 20 bp, Artificial Sequence
  mmSKRIPTE0007822_Nbl1_9
  gRNA
aaagtggggtgcgagccgcg

SEQ ID NO: 137044 - DNA, 20 bp, Artificial Sequence
  mmSKRIPTE0007823_Gper1_1
  gRNA
tgtgaatcttacctgtgccg

SEQ ID NO: 137045 - DNA, 20 bp, Artificial Sequence
  mmSKRIPTE0007824_Gper1_2
  gRNA
catgttacatgcctgctacg

SEQ ID NO: 137046 - DNA, 20 bp, Artificial Sequence
  mmSKRIPTE0007825_Gper1_3
  gRNA
caaatcctgaaaactgccga

SEQ ID NO: 137047 - DNA, 20 bp, Artificial Sequence
  mmSKRIPTE0007826_Gper1_4
  gRNA
agcggtgcacctgcggcaca

SEQ ID NO: 137048 - DNA, 20 bp, Artificial Sequence
  mmSKRIPTE0007827_Gper1_5
  gRNA
agatctacctaggtcccgtg

SEQ ID NO: 137049 - DNA, 20 bp, Artificial Sequence
  mmSKRIPTE0007828_Gper1_6
  gRNA
ggatgccgccataagatgtg

SEQ ID NO: 137050 - DNA, 20 bp, Artificial Sequence
  mmSKRIPTE0007829_Gper1_7
  gRNA
cactgcgggaagatgccccg

SEQ ID NO: 137051 - DNA, 20 bp, Artificial Sequence
  mmSKRIPTE0007830_Gper1_8
  gRNA
ggggaagacgtcacattgcg

SEQ ID NO: 137052 - DNA, 20 bp, Artificial Sequence
  mmSKRIPTE0007831_Gper1_9
  gRNA
tgacggccttgagcgtggca

SEQ ID NO: 137053 - DNA, 20 bp, Artificial Sequence
  mmSKRIPTE0007832_Lep_1
  gRNA
agtcggtatccgccaagcag

SEQ ID NO: 137054 - DNA, 20 bp, Artificial Sequence
  mmSKRIPTE0007833_Lep_2
  gRNA
cgtgggtacacgcttcgctg

SEQ ID NO: 137055 - DNA, 20 bp, Artificial Sequence
  mmSKRIPTE0007834_Lep_3
  gRNA
tgcaatagtccccagacgtg

SEQ ID NO: 137056 - DNA, 20 bp, Artificial Sequence
  mmSKRIPTE0007835_Lep_4
  gRNA
ctgtggttagaccctactca

SEQ ID NO: 137057 - DNA, 20 bp, Artificial Sequence
  mmSKRIPTE0007836_Lep_5
  gRNA
aggttcacagatgtaatgaa

SEQ ID NO: 137058 - DNA, 20 bp, Artificial Sequence
  mmSKRIPTE0007837_Lep_6
  gRNA
gcggctgaagttctccctcg

SEQ ID NO: 137059 - DNA, 20 bp, Artificial Sequence
  mmSKRIPTE0007838_Lep_7
  gRNA
aactcccaagcagcacacga

SEQ ID NO: 137060 - DNA, 20 bp, Artificial Sequence
  mmSKRIPTE0007839_Lep_8
  gRNA
cagctgcaaggtaaggcccg

SEQ ID NO: 137061 - DNA, 20 bp, Artificial Sequence
  mmSKRIPTE0007840_Lep_9
  gRNA
aaccttggagatctacacca

SEQ ID NO: 137062 - DNA, 20 bp, Artificial Sequence
  mmSKRIPTE0007841_Lag3_1
  gRNA
gtttcagctaaaaaatgacg

SEQ ID NO: 137063 - DNA, 20 bp, Artificial Sequence
  mmSKRIPTE0007842_Lag3_2
  gRNA
acccctgtccccacttccgt

SEQ ID NO: 137064 - DNA, 20 bp, Artificial Sequence
  mmSKRIPTE0007843_Lag3_3
  gRNA
cgcggggtttcgcttcgcag

SEQ ID NO: 137065 - DNA, 20 bp, Artificial Sequence
  mmSKRIPTE0007844_Lag3_4
  gRNA
gatcctaactttctacgaag

SEQ ID NO: 137066 - DNA, 20 bp, Artificial Sequence
  mmSKRIPTE0007845_Lag3_5
  gRNA
ccgggagccaggtaacccga

SEQ ID NO: 137067 - DNA, 20 bp, Artificial Sequence
  mmSKRIPTE0007846_Lag3_6
  gRNA
ccgttaccaagggtaagcag

SEQ ID NO: 137068 - DNA, 20 bp, Artificial Sequence
  mmSKRIPTE0007847_Lag3_7
  gRNA
ggtgcgggttgtctaggcga

SEQ ID NO: 137069 - DNA, 20 bp, Artificial Sequence
  mmSKRIPTE0007848_Lag3_8
  gRNA
gaaacgctcgcctttaggcg

SEQ ID NO: 137070 - DNA, 20 bp, Artificial Sequence
  mmSKRIPTE0007849_Lag3_9
  gRNA
tggcagtgtcagctgtacga

SEQ ID NO: 137071 - DNA, 20 bp, Artificial Sequence
  mmSKRIPTE0007850_Tcim_1
  gRNA
ggggcccttcataaatccga

SEQ ID NO: 137072 - DNA, 20 bp, Artificial Sequence
  mmSKRIPTE0007851_Tcim_2
  gRNA
actgcggaaatattccatca

SEQ ID NO: 137073 - DNA, 20 bp, Artificial Sequence
  mmSKRIPTE0007852_Tcim_3
  gRNA
tctgttgtaaaaatcgtccc

SEQ ID NO: 137074 - DNA, 20 bp, Artificial Sequence
  mmSKRIPTE0007853_Tcim_4
  gRNA
cgggcttactcgaagagacg

SEQ ID NO: 137075 - DNA, 20 bp, Artificial Sequence
  mmSKRIPTE0007854_Tcim_5
  gRNA
ctgtggtgatccgtccccaa

SEQ ID NO: 137076 - DNA, 20 bp, Artificial Sequence
  mmSKRIPTE0007855_Tcim_6
  gRNA
tgcgagcggctgtgtcgaag

SEQ ID NO: 137077 - DNA, 20 bp, Artificial Sequence
  mmSKRIPTE0007856_Tcim_7
  gRNA
acgtcacattgatcccaggg

SEQ ID NO: 137078 - DNA, 20 bp, Artificial Sequence
  mmSKRIPTE0007857_Tcim_8
  gRNA
ccggagccagatctttggca

SEQ ID NO: 137079 - DNA, 20 bp, Artificial Sequence
  mmSKRIPTE0007858_Tcim_9
  gRNA
gctcgggactcaaattacac

SEQ ID NO: 137080 - DNA, 20 bp, Artificial Sequence
  mmSKRIPTE0007859_Prdx2_1
  gRNA
ctcttccctagggaagtacg

SEQ ID NO: 137081 - DNA, 20 bp, Artificial Sequence
  mmSKRIPTE0007860_Prdx2_2
  gRNA
aaggacttaaagcaaggccg

SEQ ID NO: 137082 - DNA, 20 bp, Artificial Sequence
  mmSKRIPTE0007861_Prdx2_3
  gRNA
gatagtagaagtctccccca

SEQ ID NO: 137083 - DNA, 20 bp, Artificial Sequence
  mmSKRIPTE0007862_Prdx2_4
  gRNA
caacgcgcaaatcggaaagt

SEQ ID NO: 137084 - DNA, 20 bp, Artificial Sequence
  mmSKRIPTE0007863_Prdx2_5
  gRNA
atggcttcacttgtgcccgt

SEQ ID NO: 137085 - DNA, 20 bp, Artificial Sequence
  mmSKRIPTE0007864_Prdx2_6
  gRNA
ttaggggggcgggtattcag

SEQ ID NO: 137086 - DNA, 20 bp, Artificial Sequence
  mmSKRIPTE0007865_Prdx2_7
  gRNA
tggctaatcactttcatacg

SEQ ID NO: 137087 - DNA, 20 bp, Artificial Sequence
  mmSKRIPTE0007866_Prdx2_8
  gRNA
gaggtaatgcctccaccttg

SEQ ID NO: 137088 - DNA, 20 bp, Artificial Sequence
  mmSKRIPTE0007867_Prdx2_9
  gRNA
ctcagttcacccacctggcg

SEQ ID NO: 137089 - DNA, 20 bp, Artificial Sequence
  mmSKRIPTE0007868_Thy1_1
  gRNA
ggggtttgcactcgcccttg

SEQ ID NO: 137090 - DNA, 20 bp, Artificial Sequence
  mmSKRIPTE0007869_Thy1_2
  gRNA
ccgacttggattctgtggtg

SEQ ID NO: 137091 - DNA, 20 bp, Artificial Sequence
  mmSKRIPTE0007870_Thy1_3
  gRNA
ggtattcatcatgtgctccg

SEQ ID NO: 137092 - DNA, 20 bp, Artificial Sequence
  mmSKRIPTE0007871_Thy1_4
  gRNA
cccctgagactatggcaaag

SEQ ID NO: 137093 - DNA, 20 bp, Artificial Sequence
  mmSKRIPTE0007872_Thy1_5
  gRNA
tgtgagtggggcaagattag

SEQ ID NO: 137094 - DNA, 20 bp, Artificial Sequence
  mmSKRIPTE0007873_Thy1_6
  gRNA
cgtgtgctcgggtatcccaa

SEQ ID NO: 137095 - DNA, 20 bp, Artificial Sequence
  mmSKRIPTE0007874_Thy1_7
  gRNA
tggaagttggagtctgcaag

SEQ ID NO: 137096 - DNA, 20 bp, Artificial Sequence
  mmSKRIPTE0007875_Thy1_8
  gRNA
tttggggagacacagacccg

SEQ ID NO: 137097 - DNA, 20 bp, Artificial Sequence
  mmSKRIPTE0007876_Thy1_9
  gRNA
cctagccaacttcaccacca

SEQ ID NO: 137098 - DNA, 20 bp, Artificial Sequence
  mmSKRIPTE0007877_Fasl_1
  gRNA
ctactctagatacaattgtg

SEQ ID NO: 137099 - DNA, 20 bp, Artificial Sequence
  mmSKRIPTE0007878_Fasl_2
  gRNA
tattccaaagtatacttccg

SEQ ID NO: 137100 - DNA, 20 bp, Artificial Sequence
  mmSKRIPTE0007879_Fasl_3
  gRNA
cctctgaaaaaaaagagccg

SEQ ID NO: 137101 - DNA, 20 bp, Artificial Sequence
  mmSKRIPTE0007880_Fasl_4
  gRNA
aacgtgctgaagaaactcag

SEQ ID NO: 137102 - DNA, 20 bp, Artificial Sequence
  mmSKRIPTE0007881_Fasl_5
  gRNA
tgtcgtcagaaatttctggg

SEQ ID NO: 137103 - DNA, 20 bp, Artificial Sequence
  mmSKRIPTE0007882_Fasl_6
  gRNA
taagattgaatactgccccc

SEQ ID NO: 137104 - DNA, 20 bp, Artificial Sequence
  mmSKRIPTE0007883_Fasl_7
  gRNA
agcaacacagtagcccacat

SEQ ID NO: 137105 - DNA, 20 bp, Artificial Sequence
  mmSKRIPTE0007884_Fasl_8
  gRNA
gaggaactctaagtatcctg

SEQ ID NO: 137106 - DNA, 20 bp, Artificial Sequence
  mmSKRIPTE0007885_Fasl_9
  gRNA
cttcactccagagatcagag

SEQ ID NO: 137107 - DNA, 20 bp, Artificial Sequence
  mmSKRIPTE0007886_C1qbp_1
  gRNA
tgtgggctgaccttcccgtg

SEQ ID NO: 137108 - DNA, 20 bp, Artificial Sequence
  mmSKRIPTE0007887_C1qbp_2
  gRNA
tggtcaaggtagctgagtca

SEQ ID NO: 137109 - DNA, 20 bp, Artificial Sequence
  mmSKRIPTE0007888_C1qbp_3
  gRNA
ggaagcgctttccaccccag

SEQ ID NO: 137110 - DNA, 20 bp, Artificial Sequence
  mmSKRIPTE0007889_C1qbp_4
  gRNA
ggggaagctttcgatcacga

SEQ ID NO: 137111 - DNA, 20 bp, Artificial Sequence
  mmSKRIPTE0007890_C1qbp_5
  gRNA
tataatgctatcaccctggg

SEQ ID NO: 137112 - DNA, 20 bp, Artificial Sequence
  mmSKRIPTE0007891_C1qbp_6
  gRNA
cgtacgctgagcaaaccgaa

SEQ ID NO: 137113 - DNA, 20 bp, Artificial Sequence
  mmSKRIPTE0007892_C1qbp_7
  gRNA
gtgtgctgaaccacacggga

SEQ ID NO: 137114 - DNA, 20 bp, Artificial Sequence
  mmSKRIPTE0007893_C1qbp_8
  gRNA
cacgcaccctagtcggagtg

SEQ ID NO: 137115 - DNA, 20 bp, Artificial Sequence
  mmSKRIPTE0007894_C1qbp_9
  gRNA
tgtcatcctaatatatcggg

SEQ ID NO: 137116 - DNA, 20 bp, Artificial Sequence
  mmSKRIPTE0007895_Sftpd_1
  gRNA
ggatgtagccctcttcatcg

SEQ ID NO: 137117 - DNA, 20 bp, Artificial Sequence
  mmSKRIPTE0007896_Sftpd_2
  gRNA
tgggtactgatctctgcgag

SEQ ID NO: 137118 - DNA, 20 bp, Artificial Sequence
  mmSKRIPTE0007897_Sftpd_3
  gRNA
tctatcgaagtcatatggga

SEQ ID NO: 137119 - DNA, 20 bp, Artificial Sequence
  mmSKRIPTE0007898_Sftpd_4
  gRNA
actaaactgatcgatccccc

SEQ ID NO: 137120 - DNA, 20 bp, Artificial Sequence
  mmSKRIPTE0007899_Sftpd_5
  gRNA
gcccaattagaatagaccag

SEQ ID NO: 137121 - DNA, 20 bp, Artificial Sequence
  mmSKRIPTE0007900_Sftpd_6
  gRNA
tgggtggtcaatagaacttg

SEQ ID NO: 137122 - DNA, 20 bp, Artificial Sequence
  mmSKRIPTE0007901_Sftpd_7
  gRNA
gcatttacctggacctcctg

SEQ ID NO: 137123 - DNA, 20 bp, Artificial Sequence
  mmSKRIPTE0007902_Sftpd_8
  gRNA
aggaaaactacagcgtctag

SEQ ID NO: 137124 - DNA, 20 bp, Artificial Sequence
  mmSKRIPTE0007903_Sftpd_9
  gRNA
ctcagtagcagaacgtgggg

SEQ ID NO: 137125 - DNA, 20 bp, Artificial Sequence
  mmSKRIPTE0007904_Lcp1_1
  gRNA
agggatatgagacaccggag

SEQ ID NO: 137126 - DNA, 20 bp, Artificial Sequence
  mmSKRIPTE0007905_Lcp1_2
  gRNA
cttcttaagagacatctccg

SEQ ID NO: 137127 - DNA, 20 bp, Artificial Sequence
  mmSKRIPTE0007906_Lcp1_3
  gRNA
tcgcacatggatccttgacc

SEQ ID NO: 137128 - DNA, 20 bp, Artificial Sequence
  mmSKRIPTE0007907_Lcp1_4
  gRNA
aggaaaccgaactctcacgc

SEQ ID NO: 137129 - DNA, 20 bp, Artificial Sequence
  mmSKRIPTE0007908_Lcp1_5
  gRNA
ttcagcaccgacatcaaggt

SEQ ID NO: 137130 - DNA, 20 bp, Artificial Sequence
  mmSKRIPTE0007909_Lcp1_6
  gRNA
tctgtgtgtgacgaaaggta

SEQ ID NO: 137131 - DNA, 20 bp, Artificial Sequence
  mmSKRIPTE0007910_Lcp1_7
  gRNA
tagtataaatcacagtagtg

SEQ ID NO: 137132 - DNA, 20 bp, Artificial Sequence
  mmSKRIPTE0007911_Lcp1_8
  gRNA
tcactcacctaggtgagacg

SEQ ID NO: 137133 - DNA, 20 bp, Artificial Sequence
  mmSKRIPTE0007912_Lcp1_9
  gRNA
ataaaggatatctacgggcg

SEQ ID NO: 137134 - DNA, 20 bp, Artificial Sequence
  mmSKRIPTE0007913_H2-Q1_1
  gRNA
ccctgtgtagggacgtcgag

SEQ ID NO: 137135 - DNA, 20 bp, Artificial Sequence
  mmSKRIPTE0007914_H2-Q1_2
  gRNA
ataaagtccacgcagctcga

SEQ ID NO: 137136 - DNA, 20 bp, Artificial Sequence
  mmSKRIPTE0007915_H2-Q1_3
  gRNA
gaccctgaccaaaaccggag

SEQ ID NO: 137137 - DNA, 20 bp, Artificial Sequence
  mmSKRIPTE0007916_H2-Q1_4
  gRNA
agttctgtggagtcgcgcgt

SEQ ID NO: 137138 - DNA, 20 bp, Artificial Sequence
  mmSKRIPTE0007917_H2-Q1_5
  gRNA
gggaccgccatacatcactc

SEQ ID NO: 137139 - DNA, 20 bp, Artificial Sequence
  mmSKRIPTE0007918_H2-Q1_6
  gRNA
gcgcccacagagtagctggt

SEQ ID NO: 137140 - DNA, 20 bp, Artificial Sequence
  mmSKRIPTE0007919_H2-Q1_7
  gRNA
agatcttagcctaggttacg

SEQ ID NO: 137141 - DNA, 20 bp, Artificial Sequence
  mmSKRIPTE0007920_H2-Q1_8
  gRNA
gctgcggtatttcgagacct

SEQ ID NO: 137142 - DNA, 20 bp, Artificial Sequence
  mmSKRIPTE0007921_H2-Q1_9
  gRNA
tcagatgggcgccttcaaag

SEQ ID NO: 137143 - DNA, 20 bp, Artificial Sequence
  mmSKRIPTE0007922_H2-T23_1
  gRNA
aagcagatcaggctcgacaa

SEQ ID NO: 137144 - DNA, 20 bp, Artificial Sequence
  mmSKRIPTE0007923_H2-T23_2
  gRNA
cattcgcggtccaggaacgc

SEQ ID NO: 137145 - DNA, 20 bp, Artificial Sequence
  mmSKRIPTE0007924_H2-T23_3
  gRNA
gctgttcagcgggcacagcg

SEQ ID NO: 137146 - DNA, 20 bp, Artificial Sequence
  mmSKRIPTE0007925_H2-T23_4
  gRNA
ggatttcccccaaaccgcag

SEQ ID NO: 137147 - DNA, 20 bp, Artificial Sequence
  mmSKRIPTE0007926_H2-T23_5
  gRNA
ctccatagatacctacggct

SEQ ID NO: 137148 - DNA, 20 bp, Artificial Sequence
  mmSKRIPTE0007927_H2-T23_6
  gRNA
taacgacggtgagtgcggct

SEQ ID NO: 137149 - DNA, 20 bp, Artificial Sequence
  mmSKRIPTE0007928_H2-T23_7
  gRNA
ggacagggcggcggaacttg

SEQ ID NO: 137150 - DNA, 20 bp, Artificial Sequence
  mmSKRIPTE0007929_H2-T23_8
  gRNA
gaatgaatgaaaatccctgg

SEQ ID NO: 137151 - DNA, 20 bp, Artificial Sequence
  mmSKRIPTE0007930_H2-T23_9
  gRNA
aggcatgaaaatccctgggg

SEQ ID NO: 137152 - DNA, 20 bp, Artificial Sequence
  mmSKRIPTE0007931_Clcf1_1
  gRNA
tggaaaacctcccatgtcag

SEQ ID NO: 137153 - DNA, 20 bp, Artificial Sequence
  mmSKRIPTE0007932_Clcf1_2
  gRNA
gccaaaggggatactcacgt

SEQ ID NO: 137154 - DNA, 20 bp, Artificial Sequence
  mmSKRIPTE0007933_Clcf1_3
  gRNA
cctgggagagatgattgccg

SEQ ID NO: 137155 - DNA, 20 bp, Artificial Sequence
  mmSKRIPTE0007934_Clcf1_4
  gRNA
tccagccccaggatacaccg

SEQ ID NO: 137156 - DNA, 20 bp, Artificial Sequence
  mmSKRIPTE0007935_Clcf1_5
  gRNA
aaatcgtacagtgggcatcg

SEQ ID NO: 137157 - DNA, 20 bp, Artificial Sequence
  mmSKRIPTE0007936_Clcf1_6
  gRNA
ttaaagcttcgccggagccg

SEQ ID NO: 137158 - DNA, 20 bp, Artificial Sequence
  mmSKRIPTE0007937_Clcf1_7
  gRNA
agctacgcggactttgcttg

SEQ ID NO: 137159 - DNA, 20 bp, Artificial Sequence
  mmSKRIPTE0007938_Clcf1_8
  gRNA
gggaggggtccgagatcgag

SEQ ID NO: 137160 - DNA, 20 bp, Artificial Sequence
  mmSKRIPTE0007939_Clcf1_9
  gRNA
tacattgcagtagcattgtg

SEQ ID NO: 137161 - DNA, 20 bp, Artificial Sequence
  mmSKRIPTE0007940_Dab2ip_1
  gRNA
acacctccttaagctcccgt

SEQ ID NO: 137162 - DNA, 20 bp, Artificial Sequence
  mmSKRIPTE0007941_Dab2ip_2
  gRNA
catccacttatcgcgctcag

SEQ ID NO: 137163 - DNA, 20 bp, Artificial Sequence
  mmSKRIPTE0007942_Dab2ip_3
  gRNA
tggacatccctcaggatacg

SEQ ID NO: 137164 - DNA, 20 bp, Artificial Sequence
  mmSKRIPTE0007943_Dab2ip_4
  gRNA
ctgggatgggcataggaccg

SEQ ID NO: 137165 - DNA, 20 bp, Artificial Sequence
  mmSKRIPTE0007944_Dab2ip_5
  gRNA
cttgcaacagacaagtccgg

SEQ ID NO: 137166 - DNA, 20 bp, Artificial Sequence
  mmSKRIPTE0007945_Dab2ip_6
  gRNA
acctactagtgcctagatgt

SEQ ID NO: 137167 - DNA, 20 bp, Artificial Sequence
  mmSKRIPTE0007946_Dab2ip_7
  gRNA
taatccccctgggcccaaag

SEQ ID NO: 137168 - DNA, 20 bp, Artificial Sequence
  mmSKRIPTE0007947_Dab2ip_8
  gRNA
gcaggacgcactaggtagtg

SEQ ID NO: 137169 - DNA, 20 bp, Artificial Sequence
  mmSKRIPTE0007948_Dab2ip_9
  gRNA
caagtgaggtgaaatgaccg

SEQ ID NO: 137170 - DNA, 20 bp, Artificial Sequence
  mmSKRIPTE0007949_Sla2_1
  gRNA
cgtcagaggaaatagaggcg

SEQ ID NO: 137171 - DNA, 20 bp, Artificial Sequence
  mmSKRIPTE0007950_Sla2_2
  gRNA
atgtggctaaagtcgcccac

SEQ ID NO: 137172 - DNA, 20 bp, Artificial Sequence
  mmSKRIPTE0007951_Sla2_3
  gRNA
atctcgtcaaggttactcag

SEQ ID NO: 137173 - DNA, 20 bp, Artificial Sequence
  mmSKRIPTE0007952_Sla2_4
  gRNA
gaagacccactgaggtaccg

SEQ ID NO: 137174 - DNA, 20 bp, Artificial Sequence
  mmSKRIPTE0007953_Sla2_5
  gRNA
gtagtcgcactccaggagga

SEQ ID NO: 137175 - DNA, 20 bp, Artificial Sequence
  mmSKRIPTE0007954_Sla2_6
  gRNA
gccctcgtacagccacctgg

SEQ ID NO: 137176 - DNA, 20 bp, Artificial Sequence
  mmSKRIPTE0007955_Sla2_7
  gRNA
ccactcacatcttagcacaa

SEQ ID NO: 137177 - DNA, 20 bp, Artificial Sequence
  mmSKRIPTE0007956_Sla2_8
  gRNA
gtttacctagcccaatcaag

SEQ ID NO: 137178 - DNA, 20 bp, Artificial Sequence
  mmSKRIPTE0007957_Sla2_9
  gRNA
cagactatctctgagactcg

SEQ ID NO: 137179 - DNA, 20 bp, Artificial Sequence
  mmSKRIPTE0007958_Zc3h12a_1
  gRNA
acaccccgttccacgcacca

SEQ ID NO: 137180 - DNA, 20 bp, Artificial Sequence
  mmSKRIPTE0007959_Zc3h12a_2
  gRNA
agacgacgtccggcgctcag

SEQ ID NO: 137181 - DNA, 20 bp, Artificial Sequence
  mmSKRIPTE0007960_Zc3h12a_3
  gRNA
ttcacgccatccaggcgggt

SEQ ID NO: 137182 - DNA, 20 bp, Artificial Sequence
  mmSKRIPTE0007961_Zc3h12a_4
  gRNA
ggtgtatataccaagctgtg

SEQ ID NO: 137183 - DNA, 20 bp, Artificial Sequence
  mmSKRIPTE0007962_Zc3h12a_5
  gRNA
ggacaggcttcgttccacaa

SEQ ID NO: 137184 - DNA, 20 bp, Artificial Sequence
  mmSKRIPTE0007963_Zc3h12a_6
  gRNA
taggattggttctggccccg

SEQ ID NO: 137185 - DNA, 20 bp, Artificial Sequence
  mmSKRIPTE0007964_Zc3h12a_7
  gRNA
tgacaagtacgttactgctg

SEQ ID NO: 137186 - DNA, 20 bp, Artificial Sequence
  mmSKRIPTE0007965_Zc3h12a_8
  gRNA
ccgtcctaaagggtcgtcag

SEQ ID NO: 137187 - DNA, 20 bp, Artificial Sequence
  mmSKRIPTE0007966_Zc3h12a_9
  gRNA
gtttgggcatcagccacgga

SEQ ID NO: 137188 - DNA, 20 bp, Artificial Sequence
  mmSKRIPTE0007967_Cxcl3_1
  gRNA
taaggctcgaggttctgctg

SEQ ID NO: 137189 - DNA, 20 bp, Artificial Sequence
  mmSKRIPTE0007968_Cxcl3_2
  gRNA
agaaaacttgagaaacgccg

SEQ ID NO: 137190 - DNA, 20 bp, Artificial Sequence
  mmSKRIPTE0007969_Cxcl3_3
  gRNA
cacactcatcaagagcccgg

SEQ ID NO: 137191 - DNA, 20 bp, Artificial Sequence
  mmSKRIPTE0007970_Cxcl3_4
  gRNA
cttaagcaacaggccctcca

SEQ ID NO: 137192 - DNA, 20 bp, Artificial Sequence
  mmSKRIPTE0007971_Cxcl3_5
  gRNA
atgtataaaaggggttcgca

SEQ ID NO: 137193 - DNA, 20 bp, Artificial Sequence
  mmSKRIPTE0007972_Cxcl3_6
  gRNA
catcttacttctcacgacag

SEQ ID NO: 137194 - DNA, 20 bp, Artificial Sequence
  mmSKRIPTE0007973_Cxcl3_7
  gRNA
agtgcctgaacaccctacca

SEQ ID NO: 137195 - DNA, 20 bp, Artificial Sequence
  mmSKRIPTE0007974_Cxcl3_8
  gRNA
cctctttctatcgcataaga

SEQ ID NO: 137196 - DNA, 20 bp, Artificial Sequence
  mmSKRIPTE0007975_Cxcl3_9
  gRNA
ttcataagttaagtgagacc

SEQ ID NO: 137197 - DNA, 20 bp, Artificial Sequence
  mmSKRIPTE0007976_Spib_1
  gRNA
tggaaccgtagacgacatca

SEQ ID NO: 137198 - DNA, 20 bp, Artificial Sequence
  mmSKRIPTE0007977_Spib_2
  gRNA
ggggtacggagcataagcca

SEQ ID NO: 137199 - DNA, 20 bp, Artificial Sequence
  mmSKRIPTE0007978_Spib_3
  gRNA
agccagtagatggcatgggt

SEQ ID NO: 137200 - DNA, 20 bp, Artificial Sequence
  mmSKRIPTE0007979_Spib_4
  gRNA
tttgtgcacaacggaaaccc

SEQ ID NO: 137201 - DNA, 20 bp, Artificial Sequence
  mmSKRIPTE0007980_Spib_5
  gRNA
tgaaaactaagggtggcgag

SEQ ID NO: 137202 - DNA, 20 bp, Artificial Sequence
  mmSKRIPTE0007981_Spib_6
  gRNA
ctagattggaatcctataca

SEQ ID NO: 137203 - DNA, 20 bp, Artificial Sequence
  mmSKRIPTE0007982_Spib_7
  gRNA
tctgtgcttacccacgccat

SEQ ID NO: 137204 - DNA, 20 bp, Artificial Sequence
  mmSKRIPTE0007983_Spib_8
  gRNA
gagtgctcagacatgccggg

SEQ ID NO: 137205 - DNA, 20 bp, Artificial Sequence
  mmSKRIPTE0007984_Spib_9
  gRNA
cctgtcccgatagggttgtg

SEQ ID NO: 137206 - DNA, 20 bp, Artificial Sequence
  mmSKRIPTE0007985_Scg2_1
  gRNA
ctggtatggatcaagcagca

SEQ ID NO: 137207 - DNA, 20 bp, Artificial Sequence
  mmSKRIPTE0007986_Scg2_2
  gRNA
atacgagcttgaaggcacga

SEQ ID NO: 137208 - DNA, 20 bp, Artificial Sequence
  mmSKRIPTE0007987_Scg2_3
  gRNA
gtggatgcggataatactcg

SEQ ID NO: 137209 - DNA, 20 bp, Artificial Sequence
  mmSKRIPTE0007988_Scg2_4
  gRNA
gtgagcaaaaggatccccgt

SEQ ID NO: 137210 - DNA, 20 bp, Artificial Sequence
  mmSKRIPTE0007989_Scg2_5
  gRNA
acgcacaaatgaaatagtcg

SEQ ID NO: 137211 - DNA, 20 bp, Artificial Sequence
  mmSKRIPTE0007990_Scg2_6
  gRNA
gccctcactcagcggcagag

SEQ ID NO: 137212 - DNA, 20 bp, Artificial Sequence
  mmSKRIPTE0007991_Scg2_7
  gRNA
attcactaaccttctcaggt

SEQ ID NO: 137213 - DNA, 20 bp, Artificial Sequence
  mmSKRIPTE0007992_Scg2_8
  gRNA
tacgtgtgtgccgaaatgag

SEQ ID NO: 137214 - DNA, 20 bp, Artificial Sequence
  mmSKRIPTE0007993_Scg2_9
  gRNA
gcccagtccagtctcctcag

SEQ ID NO: 137215 - DNA, 20 bp, Artificial Sequence
  mmSKRIPTE0007994_Tcf3_1
  gRNA
ttaccactataggagtcggg

SEQ ID NO: 137216 - DNA, 20 bp, Artificial Sequence
  mmSKRIPTE0007995_Tcf3_2
  gRNA
attattgctggagtgatccg

SEQ ID NO: 137217 - DNA, 20 bp, Artificial Sequence
  mmSKRIPTE0007996_Tcf3_3
  gRNA
taggccgttagcagcctgtg

SEQ ID NO: 137218 - DNA, 20 bp, Artificial Sequence
  mmSKRIPTE0007997_Tcf3_4
  gRNA
ggagtccttgttcacccggg

SEQ ID NO: 137219 - DNA, 20 bp, Artificial Sequence
  mmSKRIPTE0007998_Tcf3_5
  gRNA
cctaggtgagcctacacctg

SEQ ID NO: 137220 - DNA, 20 bp, Artificial Sequence
  mmSKRIPTE0007999_Tcf3_6
  gRNA
tggtgggacagaatagtgcc

SEQ ID NO: 137221 - DNA, 20 bp, Artificial Sequence
  mmSKRIPTE0008000_Tcf3_7
  gRNA
gttcaaaatccaatcaccgg

SEQ ID NO: 137222 - DNA, 20 bp, Artificial Sequence
  mmSKRIPTE0008001_Tcf3_8
  gRNA
ctgtcccactcaccgaggaa

SEQ ID NO: 137223 - DNA, 20 bp, Artificial Sequence
  mmSKRIPTE0008002_Tcf3_9
  gRNA
tcacacaggacatttcgctg

SEQ ID NO: 137224 - DNA, 20 bp, Artificial Sequence
  mmSKRIPTE0008003_Grap_1
  gRNA
cttacggatacctccagaca

SEQ ID NO: 137225 - DNA, 20 bp, Artificial Sequence
  mmSKRIPTE0008004_Grap_2
  gRNA
tggagcgtgaggatccacac

SEQ ID NO: 137226 - DNA, 20 bp, Artificial Sequence
  mmSKRIPTE0008005_Grap_3
  gRNA
gcacttcaaagtgcttcgag

SEQ ID NO: 137227 - DNA, 20 bp, Artificial Sequence
  mmSKRIPTE0008006_Grap_4
  gRNA
cctccgccgaggtgacatcg

SEQ ID NO: 137228 - DNA, 20 bp, Artificial Sequence
  mmSKRIPTE0008007_Grap_5
  gRNA
agagacggagaactcgccag

SEQ ID NO: 137229 - DNA, 20 bp, Artificial Sequence
  mmSKRIPTE0008008_Grap_6
  gRNA
ctctcgtcaaaaatgctcag

SEQ ID NO: 137230 - DNA, 20 bp, Artificial Sequence
  mmSKRIPTE0008009_Grap_7
  gRNA
tggcagtggtgactactcac

SEQ ID NO: 137231 - DNA, 20 bp, Artificial Sequence
  mmSKRIPTE0008010_Grap_8
  gRNA
tcctggcctaatgcacagta

SEQ ID NO: 137232 - DNA, 20 bp, Artificial Sequence
  mmSKRIPTE0008011_Grap_9
  gRNA
gtaggggaggatgcccaatg

SEQ ID NO: 137233 - DNA, 20 bp, Artificial Sequence
  mmSKRIPTE0008012_Foxn1_1
  gRNA
ttgtccccaagctcacacga

SEQ ID NO: 137234 - DNA, 20 bp, Artificial Sequence
  mmSKRIPTE0008013_Foxn1_2
  gRNA
ctgaaggtcccaaaaaacga

SEQ ID NO: 137235 - DNA, 20 bp, Artificial Sequence
  mmSKRIPTE0008014_Foxn1_3
  gRNA
ccttgggcctggtagatgtg

SEQ ID NO: 137236 - DNA, 20 bp, Artificial Sequence
  mmSKRIPTE0008015_Foxn1_4
  gRNA
ctccccgactaggaaatctg

SEQ ID NO: 137237 - DNA, 20 bp, Artificial Sequence
  mmSKRIPTE0008016_Foxn1_5
  gRNA
tggcagtagagtatcgtgca

SEQ ID NO: 137238 - DNA, 20 bp, Artificial Sequence
  mmSKRIPTE0008017_Foxn1_6
  gRNA
cccctgcaggacctactggg

SEQ ID NO: 137239 - DNA, 20 bp, Artificial Sequence
  mmSKRIPTE0008018_Foxn1_7
  gRNA
ctcagcctcacagaacgtgt

SEQ ID NO: 137240 - DNA, 20 bp, Artificial Sequence
  mmSKRIPTE0008019_Foxn1_8
  gRNA
ggttggccatgcctagacgt

SEQ ID NO: 137241 - DNA, 20 bp, Artificial Sequence
  mmSKRIPTE0008020_Foxn1_9
  gRNA
ggaggatgacgtcggcgacg

SEQ ID NO: 137242 - DNA, 20 bp, Artificial Sequence
  mmSKRIPTE0008021_Adk_1
  gRNA
tatgggagtcacactgtcga

SEQ ID NO: 137243 - DNA, 20 bp, Artificial Sequence
  mmSKRIPTE0008022_Adk_2
  gRNA
tgatgacgcttgctgcgtag

SEQ ID NO: 137244 - DNA, 20 bp, Artificial Sequence
  mmSKRIPTE0008023_Adk_3
  gRNA
tttccatggcaactgcagcg

SEQ ID NO: 137245 - DNA, 20 bp, Artificial Sequence
  mmSKRIPTE0008024_Adk_4
  gRNA
aggaccgtgatcttcacaca

SEQ ID NO: 137246 - DNA, 20 bp, Artificial Sequence
  mmSKRIPTE0008025_Adk_5
  gRNA
cacgcagcacaagttcctgt

SEQ ID NO: 137247 - DNA, 20 bp, Artificial Sequence
  mmSKRIPTE0008026_Adk_6
  gRNA
gcataagcatgttgtaactg

SEQ ID NO: 137248 - DNA, 20 bp, Artificial Sequence
  mmSKRIPTE0008027_Adk_7
  gRNA
tagtggctgcaggtactgtg

SEQ ID NO: 137249 - DNA, 20 bp, Artificial Sequence
  mmSKRIPTE0008028_Adk_8
  gRNA
gaagtgaagtgattaaactg

SEQ ID NO: 137250 - DNA, 20 bp, Artificial Sequence
  mmSKRIPTE0008029_Adk_9
  gRNA
cggcagcaaggttagcaacg

SEQ ID NO: 137251 - DNA, 20 bp, Artificial Sequence
  mmSKRIPTE0008030_Arl11_1
  gRNA
ctgccctaaccactcgagag

SEQ ID NO: 137252 - DNA, 20 bp, Artificial Sequence
  mmSKRIPTE0008031_Arl11_2
  gRNA
gggcggggctccactaacaa

SEQ ID NO: 137253 - DNA, 20 bp, Artificial Sequence
  mmSKRIPTE0008032_Arl11_3
  gRNA
attgtggagaggtgccctag

SEQ ID NO: 137254 - DNA, 20 bp, Artificial Sequence
  mmSKRIPTE0008033_Arl11_4
  gRNA
ccagctcagagctacctgga

SEQ ID NO: 137255 - DNA, 20 bp, Artificial Sequence
  mmSKRIPTE0008034_Arl11_5
  gRNA
cagaggttactgcatttcag

SEQ ID NO: 137256 - DNA, 20 bp, Artificial Sequence
  mmSKRIPTE0008035_Arl11_6
  gRNA
acatactcctaagagtgcta

SEQ ID NO: 137257 - DNA, 20 bp, Artificial Sequence
  mmSKRIPTE0008036_Arl11_7
  gRNA
agctgttctgcccgctcacg

SEQ ID NO: 137258 - DNA, 20 bp, Artificial Sequence
  mmSKRIPTE0008037_Arl11_8
  gRNA
taactacttaggaaggacgc

SEQ ID NO: 137259 - DNA, 20 bp, Artificial Sequence
  mmSKRIPTE0008038_Arl11_9
  gRNA
ttgtagtgggctgttacccg

SEQ ID NO: 137260 - DNA, 20 bp, Artificial Sequence
  mmSKRIPTE0008039_Gfer_1
  gRNA
acgctcctccgaactgtcgc

SEQ ID NO: 137261 - DNA, 20 bp, Artificial Sequence
  mmSKRIPTE0008040_Gfer_2
  gRNA
gattaccagcagttcgtgag

SEQ ID NO: 137262 - DNA, 20 bp, Artificial Sequence
  mmSKRIPTE0008041_Gfer_3
  gRNA
gacctggtgactgacgcgcg

SEQ ID NO: 137263 - DNA, 20 bp, Artificial Sequence
  mmSKRIPTE0008042_Gfer_4
  gRNA
ctccaaaccttgcggcgccg

SEQ ID NO: 137264 - DNA, 20 bp, Artificial Sequence
  mmSKRIPTE0008043_Gfer_5
  gRNA
aaggagaagcgactgccgcg

SEQ ID NO: 137265 - DNA, 20 bp, Artificial Sequence
  mmSKRIPTE0008044_Gfer_6
  gRNA
tgtcccaaatgaagggtacg

SEQ ID NO: 137266 - DNA, 20 bp, Artificial Sequence
  mmSKRIPTE0008045_Gfer_7
  gRNA
aactcgatctgactagccag

SEQ ID NO: 137267 - DNA, 20 bp, Artificial Sequence
  mmSKRIPTE0008046_Gfer_8
  gRNA
tagtcggcctacttctgcag

SEQ ID NO: 137268 - DNA, 20 bp, Artificial Sequence
  mmSKRIPTE0008047_Gfer_9
  gRNA
ataatgggaattcgaaccga

SEQ ID NO: 137269 - DNA, 20 bp, Artificial Sequence
  mmSKRIPTE0008048_Ppm1b_1
  gRNA
tcgttccagtctaagcacgc

SEQ ID NO: 137270 - DNA, 20 bp, Artificial Sequence
  mmSKRIPTE0008049_Ppm1b_2
  gRNA
ttagtgttgaaatcatcgtg

SEQ ID NO: 137271 - DNA, 20 bp, Artificial Sequence
  mmSKRIPTE0008050_Ppm1b_3
  gRNA
cagcagtacccgacttactg

SEQ ID NO: 137272 - DNA, 20 bp, Artificial Sequence
  mmSKRIPTE0008051_Ppm1b_4
  gRNA
gaccagttgtccaagccgtg

SEQ ID NO: 137273 - DNA, 20 bp, Artificial Sequence
  mmSKRIPTE0008052_Ppm1b_5
  gRNA
ttacaaagctgactatgcaa

SEQ ID NO: 137274 - DNA, 20 bp, Artificial Sequence
  mmSKRIPTE0008053_Ppm1b_6
  gRNA
tagtttgtctactgacactg

SEQ ID NO: 137275 - DNA, 20 bp, Artificial Sequence
  mmSKRIPTE0008054_Ppm1b_7
  gRNA
caaatgagagttaaccatag

SEQ ID NO: 137276 - DNA, 20 bp, Artificial Sequence
  mmSKRIPTE0008055_Ppm1b_8
  gRNA
agagtacaaatgcgcaggcg

SEQ ID NO: 137277 - DNA, 20 bp, Artificial Sequence
  mmSKRIPTE0008056_Ppm1b_9
  gRNA
acagccgtaatgaagatgca

SEQ ID NO: 137278 - DNA, 20 bp, Artificial Sequence
  mmSKRIPTE0008057_Socs6_1
  gRNA
gcccagttgaataaacgtgt

SEQ ID NO: 137279 - DNA, 20 bp, Artificial Sequence
  mmSKRIPTE0008058_Socs6_2
  gRNA
gttatgcccaaacatcggga

SEQ ID NO: 137280 - DNA, 20 bp, Artificial Sequence
  mmSKRIPTE0008059_Socs6_3
  gRNA
tgtactgacggataacaaag

SEQ ID NO: 137281 - DNA, 20 bp, Artificial Sequence
  mmSKRIPTE0008060_Socs6_4
  gRNA
ggaacagtgacacttctggg

SEQ ID NO: 137282 - DNA, 20 bp, Artificial Sequence
  mmSKRIPTE0008061_Socs6_5
  gRNA
acctgcatgaatcgtgacac

SEQ ID NO: 137283 - DNA, 20 bp, Artificial Sequence
  mmSKRIPTE0008062_Socs6_6
  gRNA
ccactgggtgctgcatctaa

SEQ ID NO: 137284 - DNA, 20 bp, Artificial Sequence
  mmSKRIPTE0008063_Socs6_7
  gRNA
gagaaggcaccactcgcccc

SEQ ID NO: 137285 - DNA, 20 bp, Artificial Sequence
  mmSKRIPTE0008064_Socs6_8
  gRNA
tcagcacagcccggtaggcg

SEQ ID NO: 137286 - DNA, 20 bp, Artificial Sequence
  mmSKRIPTE0008065_Socs6_9
  gRNA
gtcatcaatttgttcaaggg

SEQ ID NO: 137287 - DNA, 20 bp, Artificial Sequence
  mmSKRIPTE0008066_Men1_1
  gRNA
ccagacagtcaatgccggtg

SEQ ID NO: 137288 - DNA, 20 bp, Artificial Sequence
  mmSKRIPTE0008067_Men1_2
  gRNA
ccaagttccctagcgccatg

SEQ ID NO: 137289 - DNA, 20 bp, Artificial Sequence
  mmSKRIPTE0008068_Men1_3
  gRNA
acgtcgtcgatagagcgcag

SEQ ID NO: 137290 - DNA, 20 bp, Artificial Sequence
  mmSKRIPTE0008069_Men1_4
  gRNA
agtgcggaaatctaccccta

SEQ ID NO: 137291 - DNA, 20 bp, Artificial Sequence
  mmSKRIPTE0008070_Men1_5
  gRNA
cccacaccagtactgcacgt

SEQ ID NO: 137292 - DNA, 20 bp, Artificial Sequence
  mmSKRIPTE0008071_Men1_6
  gRNA
ggtggtgtttgggcccaacg

SEQ ID NO: 137293 - DNA, 20 bp, Artificial Sequence
  mmSKRIPTE0008072_Men1_7
  gRNA
aacaggcgaagagcggactg

SEQ ID NO: 137294 - DNA, 20 bp, Artificial Sequence
  mmSKRIPTE0008073_Men1_8
  gRNA
attggcgcaccctccgtccg

SEQ ID NO: 137295 - DNA, 20 bp, Artificial Sequence
  mmSKRIPTE0008074_Men1_9
  gRNA
tgatggataggtcggccacc

SEQ ID NO: 137296 - DNA, 20 bp, Artificial Sequence
  mmSKRIPTE0008075_Bank1_1
  gRNA
ccagcactgctcattcggtg

SEQ ID NO: 137297 - DNA, 20 bp, Artificial Sequence
  mmSKRIPTE0008076_Bank1_2
  gRNA
actctggggattgtggcccg

SEQ ID NO: 137298 - DNA, 20 bp, Artificial Sequence
  mmSKRIPTE0008077_Bank1_3
  gRNA
gccacgttcactagagccaa

SEQ ID NO: 137299 - DNA, 20 bp, Artificial Sequence
  mmSKRIPTE0008078_Bank1_4
  gRNA
tcaacagagcaggatccgga

SEQ ID NO: 137300 - DNA, 20 bp, Artificial Sequence
  mmSKRIPTE0008079_Bank1_5
  gRNA
tactacatgtcctctatacg

SEQ ID NO: 137301 - DNA, 20 bp, Artificial Sequence
  mmSKRIPTE0008080_Bank1_6
  gRNA
accattgtgcaccatccaag

SEQ ID NO: 137302 - DNA, 20 bp, Artificial Sequence
  mmSKRIPTE0008081_Bank1_7
  gRNA
aggtcctgaagactaccttg

SEQ ID NO: 137303 - DNA, 20 bp, Artificial Sequence
  mmSKRIPTE0008082_Bank1_8
  gRNA
aaggcctaaccctagccttg

SEQ ID NO: 137304 - DNA, 20 bp, Artificial Sequence
  mmSKRIPTE0008083_Bank1_9
  gRNA
atactccggacaagtgtcgg

SEQ ID NO: 137305 - DNA, 20 bp, Artificial Sequence
  mmSKRIPTE0008084_Rac1_1
  gRNA
tggactcaacgccccatctg

SEQ ID NO: 137306 - DNA, 20 bp, Artificial Sequence
  mmSKRIPTE0008085_Rac1_2
  gRNA
ccacgggctcataaacccat

SEQ ID NO: 137307 - DNA, 20 bp, Artificial Sequence
  mmSKRIPTE0008086_Rac1_3
  gRNA
tgtgtaggttcgtgttaacg

SEQ ID NO: 137308 - DNA, 20 bp, Artificial Sequence
  mmSKRIPTE0008087_Rac1_4
  gRNA
aggaggatactcacacggtg

SEQ ID NO: 137309 - DNA, 20 bp, Artificial Sequence
  mmSKRIPTE0008088_Rac1_5
  gRNA
gccgttgttaagccgtcgtg

SEQ ID NO: 137310 - DNA, 20 bp, Artificial Sequence
  mmSKRIPTE0008089_Rac1_6
  gRNA
tggtccagaaaacaccgctg

SEQ ID NO: 137311 - DNA, 20 bp, Artificial Sequence
  mmSKRIPTE0008090_Rac1_7
  gRNA
agtaacttccaatcccgtaa

SEQ ID NO: 137312 - DNA, 20 bp, Artificial Sequence
  mmSKRIPTE0008091_Rac1_8
  gRNA
cttcgctagctatcggcgtg

SEQ ID NO: 137313 - DNA, 20 bp, Artificial Sequence
  mmSKRIPTE0008092_Rac1_9
  gRNA
agggctgagacaaacgtgtg

SEQ ID NO: 137314 - DNA, 20 bp, Artificial Sequence
  mmSKRIPTE0008093_Apobec1_1
  gRNA
aaattcctccaggtacacca

SEQ ID NO: 137315 - DNA, 20 bp, Artificial Sequence
  mmSKRIPTE0008094_Apobec1_2
  gRNA
tgctgcgtgtcatcacacaa

SEQ ID NO: 137316 - DNA, 20 bp, Artificial Sequence
  mmSKRIPTE0008095_Apobec1_3
  gRNA
cgcagcaacataagctcccg

SEQ ID NO: 137317 - DNA, 20 bp, Artificial Sequence
  mmSKRIPTE0008096_Apobec1_4
  gRNA
tgtattccgagacacttaag

SEQ ID NO: 137318 - DNA, 20 bp, Artificial Sequence
  mmSKRIPTE0008097_Apobec1_5
  gRNA
acgctgggatggaatctcag

SEQ ID NO: 137319 - DNA, 20 bp, Artificial Sequence
  mmSKRIPTE0008098_Apobec1_6
  gRNA
tccctaatcttacctccccg

SEQ ID NO: 137320 - DNA, 20 bp, Artificial Sequence
  mmSKRIPTE0008099_Apobec1_7
  gRNA
ccactcttacttgagcctga

SEQ ID NO: 137321 - DNA, 20 bp, Artificial Sequence
  mmSKRIPTE0008100_Apobec1_8
  gRNA
tctctttccgaagctcccgg

SEQ ID NO: 137322 - DNA, 20 bp, Artificial Sequence
  mmSKRIPTE0008101_Apobec1_9
  gRNA
ggcggtttcgctgatccgtg

SEQ ID NO: 137323 - DNA, 20 bp, Artificial Sequence
  mmSKRIPTE0008102_Foxf1_1
  gRNA
agaagaccaacgccggcgtg

SEQ ID NO: 137324 - DNA, 20 bp, Artificial Sequence
  mmSKRIPTE0008103_Foxf1_2
  gRNA
ggcgactgtgagtgataccg

SEQ ID NO: 137325 - DNA, 20 bp, Artificial Sequence
  mmSKRIPTE0008104_Foxf1_3
  gRNA
aactcgaccagtctaaactg

SEQ ID NO: 137326 - DNA, 20 bp, Artificial Sequence
  mmSKRIPTE0008105_Foxf1_4
  gRNA
aggatcttcagctctctgcg

SEQ ID NO: 137327 - DNA, 20 bp, Artificial Sequence
  mmSKRIPTE0008106_Foxf1_5
  gRNA
gtacccgcaccacgacagct

SEQ ID NO: 137328 - DNA, 20 bp, Artificial Sequence
  mmSKRIPTE0008107_Foxf1_6
  gRNA
gacatgacacagcacctccg

SEQ ID NO: 137329 - DNA, 20 bp, Artificial Sequence
  mmSKRIPTE0008108_Foxf1_7
  gRNA
gacaagcagcagccgccgca

SEQ ID NO: 137330 - DNA, 20 bp, Artificial Sequence
  mmSKRIPTE0008109_Foxf1_8
  gRNA
gaagcaagatcggttcacag

SEQ ID NO: 137331 - DNA, 20 bp, Artificial Sequence
  mmSKRIPTE0008110_Foxf1_9
  gRNA
ctttacaaataatccgttag

SEQ ID NO: 137332 - DNA, 20 bp, Artificial Sequence
  mmSKRIPTE0008111_Cd244_1
  gRNA
aagttgtaccgtgtacgagg

SEQ ID NO: 137333 - DNA, 20 bp, Artificial Sequence
  mmSKRIPTE0008112_Cd244_2
  gRNA
cggtcagaaacaacgatgtg

SEQ ID NO: 137334 - DNA, 20 bp, Artificial Sequence
  mmSKRIPTE0008113_Cd244_3
  gRNA
aatcacgatgatcaccccaa

SEQ ID NO: 137335 - DNA, 20 bp, Artificial Sequence
  mmSKRIPTE0008114_Cd244_4
  gRNA
acatggtgcctctatctcca

SEQ ID NO: 137336 - DNA, 20 bp, Artificial Sequence
  mmSKRIPTE0008115_Cd244_5
  gRNA
tcaatgatgctgcatgacac

SEQ ID NO: 137337 - DNA, 20 bp, Artificial Sequence
  mmSKRIPTE0008116_Cd244_6
  gRNA
aaatctagaatcccgagcag

SEQ ID NO: 137338 - DNA, 20 bp, Artificial Sequence
  mmSKRIPTE0008117_Cd244_7
  gRNA
agtgcccccacttactcgaa

SEQ ID NO: 137339 - DNA, 20 bp, Artificial Sequence
  mmSKRIPTE0008118_Cd244_8
  gRNA
atcaggatgatgtacacact

SEQ ID NO: 137340 - DNA, 20 bp, Artificial Sequence
  mmSKRIPTE0008119_Cd244_9
  gRNA
caaagaagacaaaatcggct

SEQ ID NO: 137341 - DNA, 20 bp, Artificial Sequence
  mmSKRIPTE0008120_Il2_1
  gRNA
cgatgatgagtcagcaactg

SEQ ID NO: 137342 - DNA, 20 bp, Artificial Sequence
  mmSKRIPTE0008121_Il2_2
  gRNA
ctccacttcaagctctacag

SEQ ID NO: 137343 - DNA, 20 bp, Artificial Sequence
  mmSKRIPTE0008122_Il2_3
  gRNA
ttaggacaagcatctattgg

SEQ ID NO: 137344 - DNA, 20 bp, Artificial Sequence
  mmSKRIPTE0008123_Il2_4
  gRNA
actgtgaggagtgattagca

SEQ ID NO: 137345 - DNA, 20 bp, Artificial Sequence
  mmSKRIPTE0008124_Il2_5
  gRNA
acctcagtccccctttacag

SEQ ID NO: 137346 - DNA, 20 bp, Artificial Sequence
  mmSKRIPTE0008125_Il2_6
  gRNA
tccattcagtcagtgtatgg

SEQ ID NO: 137347 - DNA, 20 bp, Artificial Sequence
  mmSKRIPTE0008126_Il2_7
  gRNA
ctgttgtaaaactaaaggta

SEQ ID NO: 137348 - DNA, 20 bp, Artificial Sequence
  mmSKRIPTE0008127_Il2_8
  gRNA
caagtgaatccttccactgt

SEQ ID NO: 137349 - DNA, 20 bp, Artificial Sequence
  mmSKRIPTE0008128_Il2_9
  gRNA
aagtgggtgcgctgttgaca

SEQ ID NO: 137350 - DNA, 20 bp, Artificial Sequence
  mmSKRIPTE0008129_Spon2_1
  gRNA
gattcccgtctgtaaccctg

SEQ ID NO: 137351 - DNA, 20 bp, Artificial Sequence
  mmSKRIPTE0008130_Spon2_2
  gRNA
tcgccaaagtgaccttcgtg

SEQ ID NO: 137352 - DNA, 20 bp, Artificial Sequence
  mmSKRIPTE0008131_Spon2_3
  gRNA
ggggacaatgcgtaccacga

SEQ ID NO: 137353 - DNA, 20 bp, Artificial Sequence
  mmSKRIPTE0008132_Spon2_4
  gRNA
gcgttccactgttaacctga

SEQ ID NO: 137354 - DNA, 20 bp, Artificial Sequence
  mmSKRIPTE0008133_Spon2_5
  gRNA
aagtctgcccggtaccgcta

SEQ ID NO: 137355 - DNA, 20 bp, Artificial Sequence
  mmSKRIPTE0008134_Spon2_6
  gRNA
ctatagactttaatcccacg

SEQ ID NO: 137356 - DNA, 20 bp, Artificial Sequence
  mmSKRIPTE0008135_Spon2_7
  gRNA
cacaatgtagagcggccagg

SEQ ID NO: 137357 - DNA, 20 bp, Artificial Sequence
  mmSKRIPTE0008136_Spon2_8
  gRNA
gcagctcttaggatccctca

SEQ ID NO: 137358 - DNA, 20 bp, Artificial Sequence
  mmSKRIPTE0008137_Spon2_9
  gRNA
ggcatctgggaaactctcga

SEQ ID NO: 137359 - DNA, 20 bp, Artificial Sequence
  mmSKRIPTE0008138_Tnfsf18_1
  gRNA
aggatgcacgggctttccga

SEQ ID NO: 137360 - DNA, 20 bp, Artificial Sequence
  mmSKRIPTE0008139_Tnfsf18_2
  gRNA
tcttcattagaccattcaca

SEQ ID NO: 137361 - DNA, 20 bp, Artificial Sequence
  mmSKRIPTE0008140_Tnfsf18_3
  gRNA
atgcaggactcgatggcagt

SEQ ID NO: 137362 - DNA, 20 bp, Artificial Sequence
  mmSKRIPTE0008141_Tnfsf18_4
  gRNA
gatgtcgtattcacacagtg

SEQ ID NO: 137363 - DNA, 20 bp, Artificial Sequence
  mmSKRIPTE0008142_Tnfsf18_5
  gRNA
agtgcttagcagtgttccaa

SEQ ID NO: 137364 - DNA, 20 bp, Artificial Sequence
  mmSKRIPTE0008143_Tnfsf18_6
  gRNA
tcagcattgctagaggtagt

SEQ ID NO: 137365 - DNA, 20 bp, Artificial Sequence
  mmSKRIPTE0008144_Tnfsf18_7
  gRNA
gatgcatcgactttacccca

SEQ ID NO: 137366 - DNA, 20 bp, Artificial Sequence
  mmSKRIPTE0008145_Tnfsf18_8
  gRNA
gaaacattgttagactggtg

SEQ ID NO: 137367 - DNA, 20 bp, Artificial Sequence
  mmSKRIPTE0008146_Tnfsf18_9
  gRNA
ctacggccaagtgattcctg

SEQ ID NO: 137368 - DNA, 20 bp, Artificial Sequence
  mmSKRIPTE0008147_Ace_1
  gRNA
cttacccgtgactttccggg

SEQ ID NO: 137369 - DNA, 20 bp, Artificial Sequence
  mmSKRIPTE0008148_Ace_2
  gRNA
gccctgaaccagctccagcg

SEQ ID NO: 137370 - DNA, 20 bp, Artificial Sequence
  mmSKRIPTE0008149_Ace_3
  gRNA
atggcacgttcgcaggaacg

SEQ ID NO: 137371 - DNA, 20 bp, Artificial Sequence
  mmSKRIPTE0008150_Ace_4
  gRNA
aagtttaaacatgagccgga

SEQ ID NO: 137372 - DNA, 20 bp, Artificial Sequence
  mmSKRIPTE0008151_Ace_5
  gRNA
acggatgttgtagagccgat

SEQ ID NO: 137373 - DNA, 20 bp, Artificial Sequence
  mmSKRIPTE0008152_Ace_6
  gRNA
gttgttgaacgagtacgcag

SEQ ID NO: 137374 - DNA, 20 bp, Artificial Sequence
  mmSKRIPTE0008153_Ace_7
  gRNA
tgggcgagacaaccttacag

SEQ ID NO: 137375 - DNA, 20 bp, Artificial Sequence
  mmSKRIPTE0008154_Ace_8
  gRNA
acaggcccaggaaattgacg

SEQ ID NO: 137376 - DNA, 20 bp, Artificial Sequence
  mmSKRIPTE0008155_Ace_9
  gRNA
tgcaaggagcatgacgtgat

SEQ ID NO: 137377 - DNA, 20 bp, Artificial Sequence
  mmSKRIPTE0008156_Sos2_1
  gRNA
atgagcagacttacaaatcg

SEQ ID NO: 137378 - DNA, 20 bp, Artificial Sequence
  mmSKRIPTE0008157_Sos2_2
  gRNA
aaaggcttcgctaccaacgc

SEQ ID NO: 137379 - DNA, 20 bp, Artificial Sequence
  mmSKRIPTE0008158_Sos2_3
  gRNA
agctcgcacaacttgtaacg

SEQ ID NO: 137380 - DNA, 20 bp, Artificial Sequence
  mmSKRIPTE0008159_Sos2_4
  gRNA
tctacctcaggcacgctacg

SEQ ID NO: 137381 - DNA, 20 bp, Artificial Sequence
  mmSKRIPTE0008160_Sos2_5
  gRNA
tcacaacttggcctaatacg

SEQ ID NO: 137382 - DNA, 20 bp, Artificial Sequence
  mmSKRIPTE0008161_Sos2_6
  gRNA
gaaaacagcccgaaatggcg

SEQ ID NO: 137383 - DNA, 20 bp, Artificial Sequence
  mmSKRIPTE0008162_Sos2_7
  gRNA
cctttcaggagttagaacgc

SEQ ID NO: 137384 - DNA, 20 bp, Artificial Sequence
  mmSKRIPTE0008163_Sos2_8
  gRNA
gctgcttaataagctatgca

SEQ ID NO: 137385 - DNA, 20 bp, Artificial Sequence
  mmSKRIPTE0008164_Sos2_9
  gRNA
tgggatttacaatgacacca

SEQ ID NO: 137386 - DNA, 20 bp, Artificial Sequence
  mmSKRIPTE0008165_Il1f5_1
  gRNA
gcagtgtgactagggctgcg

SEQ ID NO: 137387 - DNA, 20 bp, Artificial Sequence
  mmSKRIPTE0008166_Il1f5_2
  gRNA
aggctggtcagcttccggtg

SEQ ID NO: 137388 - DNA, 20 bp, Artificial Sequence
  mmSKRIPTE0008167_Il1f5_3
  gRNA
ccaaaggtacttagactgtg

SEQ ID NO: 137389 - DNA, 20 bp, Artificial Sequence
  mmSKRIPTE0008168_Il1f5_4
  gRNA
aatacaccaatgatccaggg

SEQ ID NO: 137390 - DNA, 20 bp, Artificial Sequence
  mmSKRIPTE0008169_Il1f5_5
  gRNA
ttctctggccctgaaccgag

SEQ ID NO: 137391 - DNA, 20 bp, Artificial Sequence
  mmSKRIPTE0008170_Il1f5_6
  gRNA
tggcaatttatcatcacgag

SEQ ID NO: 137392 - DNA, 20 bp, Artificial Sequence
  mmSKRIPTE0008171_Il1f5_7
  gRNA
ttgaacgcccaggatgacag

SEQ ID NO: 137393 - DNA, 20 bp, Artificial Sequence
  mmSKRIPTE0008172_Il1f5_8
  gRNA
catcatggagctctacctcg

SEQ ID NO: 137394 - DNA, 20 bp, Artificial Sequence
  mmSKRIPTE0008173_Il1f5_9
  gRNA
gaacccaatagaaaccacgt

SEQ ID NO: 137395 - DNA, 20 bp, Artificial Sequence
  mmSKRIPTE0008174_Twist2_1
  gRNA
aaaactgaaagtgccgcccg

SEQ ID NO: 137396 - DNA, 20 bp, Artificial Sequence
  mmSKRIPTE0008175_Twist2_2
  gRNA
agaaaactctcctaccccgg

SEQ ID NO: 137397 - DNA, 20 bp, Artificial Sequence
  mmSKRIPTE0008176_Twist2_3
  gRNA
acaggcgggtggattccgaa

SEQ ID NO: 137398 - DNA, 20 bp, Artificial Sequence
  mmSKRIPTE0008177_Twist2_4
  gRNA
tcccctcgaagatctaagca

SEQ ID NO: 137399 - DNA, 20 bp, Artificial Sequence
  mmSKRIPTE0008178_Twist2_5
  gRNA
atgagcgcgaggcaacaggt

SEQ ID NO: 137400 - DNA, 20 bp, Artificial Sequence
  mmSKRIPTE0008179_Twist2_6
  gRNA
ataaaatagtcgtatcccag

SEQ ID NO: 137401 - DNA, 20 bp, Artificial Sequence
  mmSKRIPTE0008180_Twist2_7
  gRNA
aaacgtcttccttaggccag

SEQ ID NO: 137402 - DNA, 20 bp, Artificial Sequence
  mmSKRIPTE0008181_Twist2_8
  gRNA
gcgcacccagtcgctcaacg

SEQ ID NO: 137403 - DNA, 20 bp, Artificial Sequence
  mmSKRIPTE0008182_Twist2_9
  gRNA
cagagcctttgagagcgacc

SEQ ID NO: 137404 - DNA, 20 bp, Artificial Sequence
  mmSKRIPTE0008183_H60c_1
  gRNA
agtgtggcgacgatttgttg

SEQ ID NO: 137405 - DNA, 20 bp, Artificial Sequence
  mmSKRIPTE0008184_H60c_2
  gRNA
cacatcgtataaagggtctg

SEQ ID NO: 137406 - DNA, 20 bp, Artificial Sequence
  mmSKRIPTE0008185_H60c_3
  gRNA
gacttgcatgccatggatcg

SEQ ID NO: 137407 - DNA, 20 bp, Artificial Sequence
  mmSKRIPTE0008186_H60c_4
  gRNA
atgttgaggatgacgaaaag

SEQ ID NO: 137408 - DNA, 20 bp, Artificial Sequence
  mmSKRIPTE0008187_H60c_5
  gRNA
ctggatagaaagaatcatcg

SEQ ID NO: 137409 - DNA, 20 bp, Artificial Sequence
  mmSKRIPTE0008188_H60c_6
  gRNA
tcattatcaacccatcaaag

SEQ ID NO: 137410 - DNA, 20 bp, Artificial Sequence
  mmSKRIPTE0008189_H60c_7
  gRNA
ttaggttagtaggactccac

SEQ ID NO: 137411 - DNA, 20 bp, Artificial Sequence
  mmSKRIPTE0008190_H60c_8
  gRNA
atgttcagtcttgataggag

SEQ ID NO: 137412 - DNA, 20 bp, Artificial Sequence
  mmSKRIPTE0008191_H60c_9
  gRNA
ctgttgcacagcaaaagggg

SEQ ID NO: 137413 - DNA, 20 bp, Artificial Sequence
  mmSKRIPTE0008192_Nlrp1a_1
  gRNA
taaccaagggaagcttaacg

SEQ ID NO: 137414 - DNA, 20 bp, Artificial Sequence
  mmSKRIPTE0008193_Nlrp1a_2
  gRNA
aatgcactgagtgttagtgt

SEQ ID NO: 137415 - DNA, 20 bp, Artificial Sequence
  mmSKRIPTE0008194_Nlrp1a_3
  gRNA
tggaggaagacacgatatag

SEQ ID NO: 137416 - DNA, 20 bp, Artificial Sequence
  mmSKRIPTE0008195_Nlrp1a_4
  gRNA
caatgactgcagtattcgaa

SEQ ID NO: 137417 - DNA, 20 bp, Artificial Sequence
  mmSKRIPTE0008196_Nlrp1a_5
  gRNA
tgtacgaccctgagaaagcg

SEQ ID NO: 137418 - DNA, 20 bp, Artificial Sequence
  mmSKRIPTE0008197_Nlrp1a_6
  gRNA
tcggcaatggtagattactg

SEQ ID NO: 137419 - DNA, 20 bp, Artificial Sequence
  mmSKRIPTE0008198_Nlrp1a_7
  gRNA
agaaacctatctgctatgtg

SEQ ID NO: 137420 - DNA, 20 bp, Artificial Sequence
  mmSKRIPTE0008199_Nlrp1a_8
  gRNA
gatggtccctacgatgaaca

SEQ ID NO: 137421 - DNA, 20 bp, Artificial Sequence
  mmSKRIPTE0008200_Nlrp1a_9
  gRNA
tcatcatagagagtagacct

SEQ ID NO: 137422 - DNA, 20 bp, Artificial Sequence
  mmSKRIPTE0008201_Gadd45g_1
  gRNA
ccgggaagaaccgaccagcg

SEQ ID NO: 137423 - DNA, 20 bp, Artificial Sequence
  mmSKRIPTE0008202_Gadd45g_2
  gRNA
gctcgtgccagaaggccacg

SEQ ID NO: 137424 - DNA, 20 bp, Artificial Sequence
  mmSKRIPTE0008203_Gadd45g_3
  gRNA
gaaagaacaagcgccgtgag

SEQ ID NO: 137425 - DNA, 20 bp, Artificial Sequence
  mmSKRIPTE0008204_Gadd45g_4
  gRNA
tcaccaagtcgatcagacca

SEQ ID NO: 137426 - DNA, 20 bp, Artificial Sequence
  mmSKRIPTE0008205_Gadd45g_5
  gRNA
aaggatgtttcacggcacct

SEQ ID NO: 137427 - DNA, 20 bp, Artificial Sequence
  mmSKRIPTE0008206_Gadd45g_6
  gRNA
gacattgatatcgtgcgcgt

SEQ ID NO: 137428 - DNA, 20 bp, Artificial Sequence
  mmSKRIPTE0008207_Gadd45g_7
  gRNA
ggcggactcgtagacgccag

SEQ ID NO: 137429 - DNA, 20 bp, Artificial Sequence
  mmSKRIPTE0008208_Gadd45g_8
  gRNA
agttatccaaaagagtgcgg

SEQ ID NO: 137430 - DNA, 20 bp, Artificial Sequence
  mmSKRIPTE0008209_Gadd45g_9
  gRNA
cctgcaaacttctatcctag

SEQ ID NO: 137431 - DNA, 20 bp, Artificial Sequence
  mmSKRIPTE0008210_Rac2_1
  gRNA
aagctgtgtcaacccgagag

SEQ ID NO: 137432 - DNA, 20 bp, Artificial Sequence
  mmSKRIPTE0008211_Rac2_2
  gRNA
tcttgggacttgatcctccg

SEQ ID NO: 137433 - DNA, 20 bp, Artificial Sequence
  mmSKRIPTE0008212_Rac2_3
  gRNA
tggacaccagtggtatggag

SEQ ID NO: 137434 - DNA, 20 bp, Artificial Sequence
  mmSKRIPTE0008213_Rac2_4
  gRNA
tgagaaaggctagcatctcg

SEQ ID NO: 137435 - DNA, 20 bp, Artificial Sequence
  mmSKRIPTE0008214_Rac2_5
  gRNA
tcaatctatggtcaagaccg

SEQ ID NO: 137436 - DNA, 20 bp, Artificial Sequence
  mmSKRIPTE0008215_Rac2_6
  gRNA
gacctcctactctacttgaa

SEQ ID NO: 137437 - DNA, 20 bp, Artificial Sequence
  mmSKRIPTE0008216_Rac2_7
  gRNA
cacaaattgcaaaagtatcg

SEQ ID NO: 137438 - DNA, 20 bp, Artificial Sequence
  mmSKRIPTE0008217_Rac2_8
  gRNA
tttaactccccaaagcgatg

SEQ ID NO: 137439 - DNA, 20 bp, Artificial Sequence
  mmSKRIPTE0008218_Rac2_9
  gRNA
ctataacccccgactgtcag

SEQ ID NO: 137440 - DNA, 20 bp, Artificial Sequence
  mmSKRIPTE0008219_Trim15_1
  gRNA
gggtcggtgaataatcccac

SEQ ID NO: 137441 - DNA, 20 bp, Artificial Sequence
  mmSKRIPTE0008220_Trim15_2
  gRNA
atgttgtggacacaccaccg

SEQ ID NO: 137442 - DNA, 20 bp, Artificial Sequence
  mmSKRIPTE0008221_Trim15_3
  gRNA
tgttaaaggactggtccgaa

SEQ ID NO: 137443 - DNA, 20 bp, Artificial Sequence
  mmSKRIPTE0008222_Trim15_4
  gRNA
tcatttatctacgttctgag

SEQ ID NO: 137444 - DNA, 20 bp, Artificial Sequence
  mmSKRIPTE0008223_Trim15_5
  gRNA
cagattcaggtaatcaacaa

SEQ ID NO: 137445 - DNA, 20 bp, Artificial Sequence
  mmSKRIPTE0008224_Trim15_6
  gRNA
ctcaaatggatttatagtgt

SEQ ID NO: 137446 - DNA, 20 bp, Artificial Sequence
  mmSKRIPTE0008225_Trim15_7
  gRNA
aacttcccaaggcatgcacg

SEQ ID NO: 137447 - DNA, 20 bp, Artificial Sequence
  mmSKRIPTE0008226_Trim15_8
  gRNA
gctgaggcgctgcttcgtgg

SEQ ID NO: 137448 - DNA, 20 bp, Artificial Sequence
  mmSKRIPTE0008227_Trim15_9
  gRNA
ctcctacagatactcccaag

SEQ ID NO: 137449 - DNA, 20 bp, Artificial Sequence
  mmSKRIPTE0008228_Csf1_1
  gRNA
gtgccaagcagcgaccaccc

SEQ ID NO: 137450 - DNA, 20 bp, Artificial Sequence
  mmSKRIPTE0008229_Csf1_2
  gRNA
atgacagcccgaacggtaga

SEQ ID NO: 137451 - DNA, 20 bp, Artificial Sequence
  mmSKRIPTE0008230_Csf1_3
  gRNA
ggattcggtgtcgcaatatg

SEQ ID NO: 137452 - DNA, 20 bp, Artificial Sequence
  mmSKRIPTE0008231_Csf1_4
  gRNA
gaacagctaaaagatgagcg

SEQ ID NO: 137453 - DNA, 20 bp, Artificial Sequence
  mmSKRIPTE0008232_Csf1_5
  gRNA
gaagcagtaactgagcaacg

SEQ ID NO: 137454 - DNA, 20 bp, Artificial Sequence
  mmSKRIPTE0008233_Csf1_6
  gRNA
atagatggaatccacgtgca

SEQ ID NO: 137455 - DNA, 20 bp, Artificial Sequence
  mmSKRIPTE0008234_Csf1_7
  gRNA
cagctttgcctacataagga

SEQ ID NO: 137456 - DNA, 20 bp, Artificial Sequence
  mmSKRIPTE0008235_Csf1_8
  gRNA
ctggtggtcttcacgcagcg

SEQ ID NO: 137457 - DNA, 20 bp, Artificial Sequence
  mmSKRIPTE0008236_Csf1_9
  gRNA
agacgtgatgatgaatgtat

SEQ ID NO: 137458 - DNA, 20 bp, Artificial Sequence
  mmSKRIPTE0008237_Shh_1
  gRNA
ataaggaagcaaaaaccccg

SEQ ID NO: 137459 - DNA, 20 bp, Artificial Sequence
  mmSKRIPTE0008238_Shh_2
  gRNA
cctagcactcctcttccggg

SEQ ID NO: 137460 - DNA, 20 bp, Artificial Sequence
  mmSKRIPTE0008239_Shh_3
  gRNA
tcgctggtaacggaacacat

SEQ ID NO: 137461 - DNA, 20 bp, Artificial Sequence
  mmSKRIPTE0008240_Shh_4
  gRNA
gtgaagctgcgagtgaccga

SEQ ID NO: 137462 - DNA, 20 bp, Artificial Sequence
  mmSKRIPTE0008241_Shh_5
  gRNA
gcacagcgtgacgctgcgag

SEQ ID NO: 137463 - DNA, 20 bp, Artificial Sequence
  mmSKRIPTE0008242_Shh_6
  gRNA
gcgcgcgttcatgtctcact

SEQ ID NO: 137464 - DNA, 20 bp, Artificial Sequence
  mmSKRIPTE0008243_Shh_7
  gRNA
ccgttgcagattgcgctgca

SEQ ID NO: 137465 - DNA, 20 bp, Artificial Sequence
  mmSKRIPTE0008244_Shh_8
  gRNA
tacgtggtggctgaacgcgg

SEQ ID NO: 137466 - DNA, 20 bp, Artificial Sequence
  mmSKRIPTE0008245_Shh_9
  gRNA
acactatgagggtcgagcag

SEQ ID NO: 137467 - DNA, 20 bp, Artificial Sequence
  mmSKRIPTE0008246_Swap70_1
  gRNA
atcagcgcattggcctaaag

SEQ ID NO: 137468 - DNA, 20 bp, Artificial Sequence
  mmSKRIPTE0008247_Swap70_2
  gRNA
cagcaactatgcacgcaggg

SEQ ID NO: 137469 - DNA, 20 bp, Artificial Sequence
  mmSKRIPTE0008248_Swap70_3
  gRNA
cacgtgggtaaggtgttacg

SEQ ID NO: 137470 - DNA, 20 bp, Artificial Sequence
  mmSKRIPTE0008249_Swap70_4
  gRNA
tccctacatccttagccgaa

SEQ ID NO: 137471 - DNA, 20 bp, Artificial Sequence
  mmSKRIPTE0008250_Swap70_5
  gRNA
ataatatgtaacaccagtcg

SEQ ID NO: 137472 - DNA, 20 bp, Artificial Sequence
  mmSKRIPTE0008251_Swap70_6
  gRNA
cagaccaggcaatcggccaa

SEQ ID NO: 137473 - DNA, 20 bp, Artificial Sequence
  mmSKRIPTE0008252_Swap70_7
  gRNA
tggcacctactgtacacccg

SEQ ID NO: 137474 - DNA, 20 bp, Artificial Sequence
  mmSKRIPTE0008253_Swap70_8
  gRNA
gttacagattccaactagtg

SEQ ID NO: 137475 - DNA, 20 bp, Artificial Sequence
  mmSKRIPTE0008254_Swap70_9
  gRNA
ttaatacgattgatagaacc

SEQ ID NO: 137476 - DNA, 20 bp, Artificial Sequence
  mmSKRIPTE0008255_Jaml_1
  gRNA
ccaaccttagcgtgcctacg

SEQ ID NO: 137477 - DNA, 20 bp, Artificial Sequence
  mmSKRIPTE0008256_Jaml_2
  gRNA
tatgactccaacatgcgtag

SEQ ID NO: 137478 - DNA, 20 bp, Artificial Sequence
  mmSKRIPTE0008257_Jaml_3
  gRNA
tggatctgtaacgtgaacag

SEQ ID NO: 137479 - DNA, 20 bp, Artificial Sequence
  mmSKRIPTE0008258_Jaml_4
  gRNA
atgctgggtcacggacggag

SEQ ID NO: 137480 - DNA, 20 bp, Artificial Sequence
  mmSKRIPTE0008259_Jaml_5
  gRNA
gtgctaccagaggaacctaa

SEQ ID NO: 137481 - DNA, 20 bp, Artificial Sequence
  mmSKRIPTE0008260_Jaml_6
  gRNA
ccagatctcagagtccgagt

SEQ ID NO: 137482 - DNA, 20 bp, Artificial Sequence
  mmSKRIPTE0008261_Jaml_7
  gRNA
gccctgtggataacctacag

SEQ ID NO: 137483 - DNA, 20 bp, Artificial Sequence
  mmSKRIPTE0008262_Jaml_8
  gRNA
ggtaagaccaggctcagttg

SEQ ID NO: 137484 - DNA, 20 bp, Artificial Sequence
  mmSKRIPTE0008263_Jaml_9
  gRNA
tataacccatagctgcgcca

SEQ ID NO: 137485 - DNA, 20 bp, Artificial Sequence
  mmSKRIPTE0008264_Xcl1_1
  gRNA
gcacagcgataaccctgact

SEQ ID NO: 137486 - DNA, 20 bp, Artificial Sequence
  mmSKRIPTE0008265_Xcl1_2
  gRNA
tgcacaaggaaagatatcgt

SEQ ID NO: 137487 - DNA, 20 bp, Artificial Sequence
  mmSKRIPTE0008266_Xcl1_3
  gRNA
ccctctgagaagaaatcccg

SEQ ID NO: 137488 - DNA, 20 bp, Artificial Sequence
  mmSKRIPTE0008267_Xcl1_4
  gRNA
gatgagctgcttaacgagtg

SEQ ID NO: 137489 - DNA, 20 bp, Artificial Sequence
  mmSKRIPTE0008268_Xcl1_5
  gRNA
gtgtgaacttacaaacccag

SEQ ID NO: 137490 - DNA, 20 bp, Artificial Sequence
  mmSKRIPTE0008269_Xcl1_6
  gRNA
ctcaccccatgggttgtgga

SEQ ID NO: 137491 - DNA, 20 bp, Artificial Sequence
  mmSKRIPTE0008270_Xcl1_7
  gRNA
tctagaaaaatgggtcagcg

SEQ ID NO: 137492 - DNA, 20 bp, Artificial Sequence
  mmSKRIPTE0008271_Xcl1_8
  gRNA
tataatgcacaagtgactcg

SEQ ID NO: 137493 - DNA, 20 bp, Artificial Sequence
  mmSKRIPTE0008272_Xcl1_9
  gRNA
ttcagcataggatattggct

SEQ ID NO: 137494 - DNA, 20 bp, Artificial Sequence
  mmSKRIPTE0008273_Irgm1_1
  gRNA
ctgcatagtagtcttcaaag

SEQ ID NO: 137495 - DNA, 20 bp, Artificial Sequence
  mmSKRIPTE0008274_Irgm1_2
  gRNA
ggccacagcccaaaccgtag

SEQ ID NO: 137496 - DNA, 20 bp, Artificial Sequence
  mmSKRIPTE0008275_Irgm1_3
  gRNA
atgcattagaatcgagacag

SEQ ID NO: 137497 - DNA, 20 bp, Artificial Sequence
  mmSKRIPTE0008276_Irgm1_4
  gRNA
tgctgactcaccgtcaacag

SEQ ID NO: 137498 - DNA, 20 bp, Artificial Sequence
  mmSKRIPTE0008277_Irgm1_5
  gRNA
acagctgcacaaccatcccc

SEQ ID NO: 137499 - DNA, 20 bp, Artificial Sequence
  mmSKRIPTE0008278_Irgm1_6
  gRNA
ttaaacagcagcatacgcat

SEQ ID NO: 137500 - DNA, 20 bp, Artificial Sequence
  mmSKRIPTE0008279_Irgm1_7
  gRNA
ccttatactagatctgcgga

SEQ ID NO: 137501 - DNA, 20 bp, Artificial Sequence
  mmSKRIPTE0008280_Irgm1_8
  gRNA
acatagggaacttctgccgg

SEQ ID NO: 137502 - DNA, 20 bp, Artificial Sequence
  mmSKRIPTE0008281_Irgm1_9
  gRNA
caagaggaggtctgatcgcg

SEQ ID NO: 137503 - DNA, 20 bp, Artificial Sequence
  mmSKRIPTE0008282_Sectm1a_1
  gRNA
ggcagaagcccatctagggt

SEQ ID NO: 137504 - DNA, 20 bp, Artificial Sequence
  mmSKRIPTE0008283_Sectm1a_2
  gRNA
acccagcagactcagtacca

SEQ ID NO: 137505 - DNA, 20 bp, Artificial Sequence
  mmSKRIPTE0008284_Sectm1a_3
  gRNA
gccgatcgtcaagagctgtg

SEQ ID NO: 137506 - DNA, 20 bp, Artificial Sequence
  mmSKRIPTE0008285_Sectm1a_4
  gRNA
atcactgcaggattgcctcg

SEQ ID NO: 137507 - DNA, 20 bp, Artificial Sequence
  mmSKRIPTE0008286_Sectm1a_5
  gRNA
gctgagtgttcttagctagg

SEQ ID NO: 137508 - DNA, 20 bp, Artificial Sequence
  mmSKRIPTE0008287_Sectm1a_6
  gRNA
aggctaggactactcccacc

SEQ ID NO: 137509 - DNA, 20 bp, Artificial Sequence
  mmSKRIPTE0008288_Sectm1a_7
  gRNA
ctactgaggtcataatcgat

SEQ ID NO: 137510 - DNA, 20 bp, Artificial Sequence
  mmSKRIPTE0008289_Sectm1a_8
  gRNA
acttaatctgtcctgcggtg

SEQ ID NO: 137511 - DNA, 20 bp, Artificial Sequence
  mmSKRIPTE0008290_Sectm1a_9
  gRNA
tccccgctaagaagagccaa

SEQ ID NO: 137512 - DNA, 20 bp, Artificial Sequence
  mmSKRIPTE0008291_Ighg2b_1
  gRNA
acccagcatcttgagtgggt

SEQ ID NO: 137513 - DNA, 20 bp, Artificial Sequence
  mmSKRIPTE0008292_Ighg2b_2
  gRNA
agacggatggtccaccctcg

SEQ ID NO: 137514 - DNA, 20 bp, Artificial Sequence
  mmSKRIPTE0008293_Ighg2b_3
  gRNA
gacaagcacacctatcccag

SEQ ID NO: 137515 - DNA, 20 bp, Artificial Sequence
  mmSKRIPTE0008294_Ighg2b_4
  gRNA
ctcatggtgatccttatgtg

SEQ ID NO: 137516 - DNA, 20 bp, Artificial Sequence
  mmSKRIPTE0008295_Ighg2b_5
  gRNA
tcatgcaacgtgagacacga

SEQ ID NO: 137517 - DNA, 20 bp, Artificial Sequence
  mmSKRIPTE0008296_Ighg2b_6
  gRNA
tacaccactgagtactggct

SEQ ID NO: 137518 - DNA, 20 bp, Artificial Sequence
  mmSKRIPTE0008297_Ighg2b_7
  gRNA
ccagggtcacaatagcccaa

SEQ ID NO: 137519 - DNA, 20 bp, Artificial Sequence
  mmSKRIPTE0008298_Ighg2b_8
  gRNA
agaatctctccaaatatccg

SEQ ID NO: 137520 - DNA, 20 bp, Artificial Sequence
  mmSKRIPTE0008299_Ighg2b_9
  gRNA
tcagaccctccaatcctgtg

SEQ ID NO: 137521 - DNA, 20 bp, Artificial Sequence
  mmSKRIPTE0008300_Dusp22_1
  gRNA
gcgtgcccctttgagagcgg

SEQ ID NO: 137522 - DNA, 20 bp, Artificial Sequence
  mmSKRIPTE0008301_Dusp22_2
  gRNA
tgaaacgaagcacttacgtg

SEQ ID NO: 137523 - DNA, 20 bp, Artificial Sequence
  mmSKRIPTE0008302_Dusp22_3
  gRNA
ggcattactgtccggccgtg

SEQ ID NO: 137524 - DNA, 20 bp, Artificial Sequence
  mmSKRIPTE0008303_Dusp22_4
  gRNA
tgtctgccgctggaatacac

SEQ ID NO: 137525 - DNA, 20 bp, Artificial Sequence
  mmSKRIPTE0008304_Dusp22_5
  gRNA
tgggtgcttccagagtaggc

SEQ ID NO: 137526 - DNA, 20 bp, Artificial Sequence
  mmSKRIPTE0008305_Dusp22_6
  gRNA
acgttaggatgaccaccatg

SEQ ID NO: 137527 - DNA, 20 bp, Artificial Sequence
  mmSKRIPTE0008306_Dusp22_7
  gRNA
tacgagaggaggtcgcagca

SEQ ID NO: 137528 - DNA, 20 bp, Artificial Sequence
  mmSKRIPTE0008307_Dusp22_8
  gRNA
ctaaataagatcatacacag

SEQ ID NO: 137529 - DNA, 20 bp, Artificial Sequence
  mmSKRIPTE0008308_Dusp22_9
  gRNA
gggatgagccaggtaacgtc

SEQ ID NO: 137530 - DNA, 20 bp, Artificial Sequence
  mmSKRIPTE0008309_Lmo2_1
  gRNA
cagagcttaaggccacggga

SEQ ID NO: 137531 - DNA, 20 bp, Artificial Sequence
  mmSKRIPTE0008310_Lmo2_2
  gRNA
tgtttccagagtcacccgcg

SEQ ID NO: 137532 - DNA, 20 bp, Artificial Sequence
  mmSKRIPTE0008311_Lmo2_3
  gRNA
gtgaagacgccgtctcggtg

SEQ ID NO: 137533 - DNA, 20 bp, Artificial Sequence
  mmSKRIPTE0008312_Lmo2_4
  gRNA
tgtaactgggatcgaccctg

SEQ ID NO: 137534 - DNA, 20 bp, Artificial Sequence
  mmSKRIPTE0008313_Lmo2_5
  gRNA
gcggtgactgtccttgagcg

SEQ ID NO: 137535 - DNA, 20 bp, Artificial Sequence
  mmSKRIPTE0008314_Lmo2_6
  gRNA
atctaatcgatagttacctg

SEQ ID NO: 137536 - DNA, 20 bp, Artificial Sequence
  mmSKRIPTE0008315_Lmo2_7
  gRNA
gtgaacaagacatctacgag

SEQ ID NO: 137537 - DNA, 20 bp, Artificial Sequence
  mmSKRIPTE0008316_Lmo2_8
  gRNA
taggcaatgctgcacctagt

SEQ ID NO: 137538 - DNA, 20 bp, Artificial Sequence
  mmSKRIPTE0008317_Lmo2_9
  gRNA
aggggcgaacatgtaccggg

SEQ ID NO: 137539 - DNA, 20 bp, Artificial Sequence
  mmSKRIPTE0008318_Itch_1
  gRNA
ccatcttagcggagggactg

SEQ ID NO: 137540 - DNA, 20 bp, Artificial Sequence
  mmSKRIPTE0008319_Itch_2
  gRNA
aattgtgttgagcagcgtga

SEQ ID NO: 137541 - DNA, 20 bp, Artificial Sequence
  mmSKRIPTE0008320_Itch_3
  gRNA
tagacgtggagttacgcatg

SEQ ID NO: 137542 - DNA, 20 bp, Artificial Sequence
  mmSKRIPTE0008321_Itch_4
  gRNA
gctgagtggaggttgtctcg

SEQ ID NO: 137543 - DNA, 20 bp, Artificial Sequence
  mmSKRIPTE0008322_Itch_5
  gRNA
gccgtgtctaccctcttaca

SEQ ID NO: 137544 - DNA, 20 bp, Artificial Sequence
  mmSKRIPTE0008323_Itch_6
  gRNA
acacagaagaacctgcacga

SEQ ID NO: 137545 - DNA, 20 bp, Artificial Sequence
  mmSKRIPTE0008324_Itch_7
  gRNA
aatctagtggaataagacga

SEQ ID NO: 137546 - DNA, 20 bp, Artificial Sequence
  mmSKRIPTE0008325_Itch_8
  gRNA
cacagtctaatgctaagcca

SEQ ID NO: 137547 - DNA, 20 bp, Artificial Sequence
  mmSKRIPTE0008326_Itch_9
  gRNA
gtgtgagcgcgcatcccgtg

SEQ ID NO: 137548 - DNA, 20 bp, Artificial Sequence
  mmSKRIPTE0008327_Clec2i_1
  gRNA
gggcaaatgtccagttacgt

SEQ ID NO: 137549 - DNA, 20 bp, Artificial Sequence
  mmSKRIPTE0008328_Clec2i_2
  gRNA
ggaactgaaaaactgcggcg

SEQ ID NO: 137550 - DNA, 20 bp, Artificial Sequence
  mmSKRIPTE0008329_Clec2i_3
  gRNA
ccgaaagtaagctcatgcaa

SEQ ID NO: 137551 - DNA, 20 bp, Artificial Sequence
  mmSKRIPTE0008330_Clec2i_4
  gRNA
aaaaatgagtccccaacgtg

SEQ ID NO: 137552 - DNA, 20 bp, Artificial Sequence
  mmSKRIPTE0008331_Clec2i_5
  gRNA
gatcctatcgctgctcaggt

SEQ ID NO: 137553 - DNA, 20 bp, Artificial Sequence
  mmSKRIPTE0008332_Clec2i_6
  gRNA
ctaatgcagatgactcctca

SEQ ID NO: 137554 - DNA, 20 bp, Artificial Sequence
  mmSKRIPTE0008333_Clec2i_7
  gRNA
ttctgtgtaggcgatgctat

SEQ ID NO: 137555 - DNA, 20 bp, Artificial Sequence
  mmSKRIPTE0008334_Clec2i_8
  gRNA
acaaatctacaaaagaccgt

SEQ ID NO: 137556 - DNA, 20 bp, Artificial Sequence
  mmSKRIPTE0008335_Clec2i_9
  gRNA
tttcctaaagagattcaagg

SEQ ID NO: 137557 - DNA, 20 bp, Artificial Sequence
  mmSKRIPTE0008336_Hcst_1
  gRNA
gagcgggtcagaaggtgccg

SEQ ID NO: 137558 - DNA, 20 bp, Artificial Sequence
  mmSKRIPTE0008337_Hcst_2
  gRNA
agcttccgtgatcatctcgg

SEQ ID NO: 137559 - DNA, 20 bp, Artificial Sequence
  mmSKRIPTE0008338_Hcst_3
  gRNA
ttaggatcgtcacaagccag

SEQ ID NO: 137560 - DNA, 20 bp, Artificial Sequence
  mmSKRIPTE0008339_Hcst_4
  gRNA
taggacggatgtcaccccga

SEQ ID NO: 137561 - DNA, 20 bp, Artificial Sequence
  mmSKRIPTE0008340_Hcst_5
  gRNA
tcttccctagggactgctag

SEQ ID NO: 137562 - DNA, 20 bp, Artificial Sequence
  mmSKRIPTE0008341_Hcst_6
  gRNA
atctgttacagagaatctcg

SEQ ID NO: 137563 - DNA, 20 bp, Artificial Sequence
  mmSKRIPTE0008342_Hcst_7
  gRNA
cctttggagaacaaatatgg

SEQ ID NO: 137564 - DNA, 20 bp, Artificial Sequence
  mmSKRIPTE0008343_Hcst_8
  gRNA
ggaagtcctcagaacagtag

SEQ ID NO: 137565 - DNA, 20 bp, Artificial Sequence
  mmSKRIPTE0008344_Hcst_9
  gRNA
aagtcagacatcggcaggtg

SEQ ID NO: 137566 - DNA, 20 bp, Artificial Sequence
  mmSKRIPTE0008345_Klf13_1
  gRNA
acctgaactgaaatagcacg

SEQ ID NO: 137567 - DNA, 20 bp, Artificial Sequence
  mmSKRIPTE0008346_Klf13_2
  gRNA
agtgtgttcagcactcacgc

SEQ ID NO: 137568 - DNA, 20 bp, Artificial Sequence
  mmSKRIPTE0008347_Klf13_3
  gRNA
agggatgaacgcggtccacg

SEQ ID NO: 137569 - DNA, 20 bp, Artificial Sequence
  mmSKRIPTE0008348_Klf13_4
  gRNA
actcctttgccttgacatcg

SEQ ID NO: 137570 - DNA, 20 bp, Artificial Sequence
  mmSKRIPTE0008349_Klf13_5
  gRNA
aatcttctcatggaacacga

SEQ ID NO: 137571 - DNA, 20 bp, Artificial Sequence
  mmSKRIPTE0008350_Klf13_6
  gRNA
gtttatacagaaccatcgtg

SEQ ID NO: 137572 - DNA, 20 bp, Artificial Sequence
  mmSKRIPTE0008351_Klf13_7
  gRNA
ggagtggtcctgcatcacat

SEQ ID NO: 137573 - DNA, 20 bp, Artificial Sequence
  mmSKRIPTE0008352_Klf13_8
  gRNA
gttgtgtagtgtcagtctcg

SEQ ID NO: 137574 - DNA, 20 bp, Artificial Sequence
  mmSKRIPTE0008353_Klf13_9
  gRNA
ctgagcaaactggtaatgca

SEQ ID NO: 137575 - DNA, 20 bp, Artificial Sequence
  mmSKRIPTE0008354_Plscr1_1
  gRNA
tcgcggatctgtgcgcacaa

SEQ ID NO: 137576 - DNA, 20 bp, Artificial Sequence
  mmSKRIPTE0008355_Plscr1_2
  gRNA
gtgccgcgatggcctatgaa

SEQ ID NO: 137577 - DNA, 20 bp, Artificial Sequence
  mmSKRIPTE0008356_Plscr1_3
  gRNA
cggttcgaataattgagtgt

SEQ ID NO: 137578 - DNA, 20 bp, Artificial Sequence
  mmSKRIPTE0008357_Plscr1_4
  gRNA
cccggctttccctcgcagag

SEQ ID NO: 137579 - DNA, 20 bp, Artificial Sequence
  mmSKRIPTE0008358_Plscr1_5
  gRNA
ttgtaggggagctaatatga

SEQ ID NO: 137580 - DNA, 20 bp, Artificial Sequence
  mmSKRIPTE0008359_Plscr1_6
  gRNA
tgaaaagaacgtatcccgat

SEQ ID NO: 137581 - DNA, 20 bp, Artificial Sequence
  mmSKRIPTE0008360_Plscr1_7
  gRNA
tgggcgcgggagatgcggat

SEQ ID NO: 137582 - DNA, 20 bp, Artificial Sequence
  mmSKRIPTE0008361_Plscr1_8
  gRNA
tttgagtaagtagatcagcc

SEQ ID NO: 137583 - DNA, 20 bp, Artificial Sequence
  mmSKRIPTE0008362_Plscr1_9
  gRNA
ctcatcacccaaatacacaa

SEQ ID NO: 137584 - DNA, 20 bp, Artificial Sequence
  mmSKRIPTE0008363_Ccl22_1
  gRNA
tgacagtcatgacactgacc

SEQ ID NO: 137585 - DNA, 20 bp, Artificial Sequence
  mmSKRIPTE0008364_Ccl22_2
  gRNA
tctgccatcacgtttagtga

SEQ ID NO: 137586 - DNA, 20 bp, Artificial Sequence
  mmSKRIPTE0008365_Ccl22_3
  gRNA
aaaggcggggaactactcag

SEQ ID NO: 137587 - DNA, 20 bp, Artificial Sequence
  mmSKRIPTE0008366_Ccl22_4
  gRNA
ggtccaatgtctacgctctg

SEQ ID NO: 137588 - DNA, 20 bp, Artificial Sequence
  mmSKRIPTE0008367_Ccl22_5
  gRNA
gtcaggtgtctaatgaccag

SEQ ID NO: 137589 - DNA, 20 bp, Artificial Sequence
  mmSKRIPTE0008368_Ccl22_6
  gRNA
aggtccctatggtgccaatg

SEQ ID NO: 137590 - DNA, 20 bp, Artificial Sequence
  mmSKRIPTE0008369_Ccl22_7
  gRNA
gtcatctccaaggcccgtgg

SEQ ID NO: 137591 - DNA, 20 bp, Artificial Sequence
  mmSKRIPTE0008370_Ccl22_8
  gRNA
gggcatcaaaacaaggacgc

SEQ ID NO: 137592 - DNA, 20 bp, Artificial Sequence
  mmSKRIPTE0008371_Ccl22_9
  gRNA
ctccataaactgtcctaggg

SEQ ID NO: 137593 - DNA, 20 bp, Artificial Sequence
  mmSKRIPTE0008372_Il18_1
  gRNA
tagtgatcggcctattaagg

SEQ ID NO: 137594 - DNA, 20 bp, Artificial Sequence
  mmSKRIPTE0008373_Il18_2
  gRNA
ctgttatggaaatacaggcg

SEQ ID NO: 137595 - DNA, 20 bp, Artificial Sequence
  mmSKRIPTE0008374_Il18_3
  gRNA
taaggggtgtctggtcaacg

SEQ ID NO: 137596 - DNA, 20 bp, Artificial Sequence
  mmSKRIPTE0008375_Il18_4
  gRNA
tccagctctagatcaagggt

SEQ ID NO: 137597 - DNA, 20 bp, Artificial Sequence
  mmSKRIPTE0008376_Il18_5
  gRNA
caggagcgatgaaaggctcg

SEQ ID NO: 137598 - DNA, 20 bp, Artificial Sequence
  mmSKRIPTE0008377_Il18_6
  gRNA
acctgcagaaacgtagccaa

SEQ ID NO: 137599 - DNA, 20 bp, Artificial Sequence
  mmSKRIPTE0008378_Il18_7
  gRNA
tggagctactctccggccag

SEQ ID NO: 137600 - DNA, 20 bp, Artificial Sequence
  mmSKRIPTE0008379_Il18_8
  gRNA
ctgcggttgtacagtgaagt

SEQ ID NO: 137601 - DNA, 20 bp, Artificial Sequence
  mmSKRIPTE0008380_Il18_9
  gRNA
ttgatcattgctgcacctag

SEQ ID NO: 137602 - DNA, 20 bp, Artificial Sequence
  mmSKRIPTE0008381_Ighv13-2_1
  gRNA
ggtgcagcttgtagagaccg

SEQ ID NO: 137603 - DNA, 20 bp, Artificial Sequence
  mmSKRIPTE0008382_Ighv13-2_2
  gRNA
gttcgttcatgaccatcagg

SEQ ID NO: 137604 - DNA, 20 bp, Artificial Sequence
  mmSKRIPTE0008383_Ighv13-2_3
  gRNA
tttgtagtagacacactgtg

SEQ ID NO: 137605 - DNA, 20 bp, Artificial Sequence
  mmSKRIPTE0008384_Ighv13-2_4
  gRNA
gatttatgaagggtgtgagt

SEQ ID NO: 137606 - DNA, 20 bp, Artificial Sequence
  mmSKRIPTE0008385_Ighv13-2_5
  gRNA
actgagctgggtatttcttg

SEQ ID NO: 137607 - DNA, 20 bp, Artificial Sequence
  mmSKRIPTE0008386_Ighv13-2_6
  gRNA
gctggcgaagccagtgcatc

SEQ ID NO: 137608 - DNA, 20 bp, Artificial Sequence
  mmSKRIPTE0008387_Ighv13-2_7
  gRNA
aaactctcctgtgttacctc

SEQ ID NO: 137609 - DNA, 20 bp, Artificial Sequence
  mmSKRIPTE0008388_Ighv13-2_8
  gRNA
gaactggtactttgtgagaa

SEQ ID NO: 137610 - DNA, 20 bp, Artificial Sequence
  mmSKRIPTE0008389_Ighv13-2_9
  gRNA
tcaacacaaaatatctatca

SEQ ID NO: 137611 - DNA, 20 bp, Artificial Sequence
  mmSKRIPTE0008390_Elf1_1
  gRNA
aggagttgtcatccgcgtcg

SEQ ID NO: 137612 - DNA, 20 bp, Artificial Sequence
  mmSKRIPTE0008391_Elf1_2
  gRNA
gaagtgatcacagtgcccgg

SEQ ID NO: 137613 - DNA, 20 bp, Artificial Sequence
  mmSKRIPTE0008392_Elf1_3
  gRNA
ctgtttgacggctacctgag

SEQ ID NO: 137614 - DNA, 20 bp, Artificial Sequence
  mmSKRIPTE0008393_Elf1_4
  gRNA
ttgagtcgattaaacagccg

SEQ ID NO: 137615 - DNA, 20 bp, Artificial Sequence
  mmSKRIPTE0008394_Elf1_5
  gRNA
gatatttggtgtagtcgtcg

SEQ ID NO: 137616 - DNA, 20 bp, Artificial Sequence
  mmSKRIPTE0008395_Elf1_6
  gRNA
ctggctataaccgttgtgag

SEQ ID NO: 137617 - DNA, 20 bp, Artificial Sequence
  mmSKRIPTE0008396_Elf1_7
  gRNA
cgtcgcgctgaacgatggtg

SEQ ID NO: 137618 - DNA, 20 bp, Artificial Sequence
  mmSKRIPTE0008397_Elf1_8
  gRNA
taaccagagctcatggccgt

SEQ ID NO: 137619 - DNA, 20 bp, Artificial Sequence
  mmSKRIPTE0008398_Elf1_9
  gRNA
ctataggtttaacataccga

SEQ ID NO: 137620 - DNA, 20 bp, Artificial Sequence
  mmSKRIPTE0008399_H2-M10.6_1
  gRNA
tgaagccctacttatcagag

SEQ ID NO: 137621 - DNA, 20 bp, Artificial Sequence
  mmSKRIPTE0008400_H2-M10.6_2
  gRNA
gtagtgatttagacctgatg

SEQ ID NO: 137622 - DNA, 20 bp, Artificial Sequence
  mmSKRIPTE0008401_H2-M10.6_3
  gRNA
tctccatcccttctatcaag

SEQ ID NO: 137623 - DNA, 20 bp, Artificial Sequence
  mmSKRIPTE0008402_H2-M10.6_4
  gRNA
gctgcaacgtggcaaatgat

SEQ ID NO: 137624 - DNA, 20 bp, Artificial Sequence
  mmSKRIPTE0008403_H2-M10.6_5
  gRNA
tggagtctacgtatccgacc

SEQ ID NO: 137625 - DNA, 20 bp, Artificial Sequence
  mmSKRIPTE0008404_H2-M10.6_6
  gRNA
ttacctgctaggggaatgcg

SEQ ID NO: 137626 - DNA, 20 bp, Artificial Sequence
  mmSKRIPTE0008405_H2-M10.6_7
  gRNA
gaccaagctacaaaagtacc

SEQ ID NO: 137627 - DNA, 20 bp, Artificial Sequence
  mmSKRIPTE0008406_H2-M10.6_8
  gRNA
ttcagtctagcaagtcacac

SEQ ID NO: 137628 - DNA, 20 bp, Artificial Sequence
  mmSKRIPTE0008407_H2-M10.6_9
  gRNA
tgagccggtagtgaccttcg

SEQ ID NO: 137629 - DNA, 20 bp, Artificial Sequence
  mmSKRIPTE0008408_Flt3l_1
  gRNA
caaatgtgcgtatacctgag

SEQ ID NO: 137630 - DNA, 20 bp, Artificial Sequence
  mmSKRIPTE0008409_Flt3l_2
  gRNA
cagatccccaggtgacctcg

SEQ ID NO: 137631 - DNA, 20 bp, Artificial Sequence
  mmSKRIPTE0008410_Flt3l_3
  gRNA
tctgaagccctgtatcggga

SEQ ID NO: 137632 - DNA, 20 bp, Artificial Sequence
  mmSKRIPTE0008411_Flt3l_4
  gRNA
tcctaacaactggagaaccc

SEQ ID NO: 137633 - DNA, 20 bp, Artificial Sequence
  mmSKRIPTE0008412_Flt3l_5
  gRNA
ctccccctaaaagacccggc

SEQ ID NO: 137634 - DNA, 20 bp, Artificial Sequence
  mmSKRIPTE0008413_Flt3l_6
  gRNA
tttcccacagcataccacgg

SEQ ID NO: 137635 - DNA, 20 bp, Artificial Sequence
  mmSKRIPTE0008414_Flt3l_7
  gRNA
gctaacctggaaggtacatg

SEQ ID NO: 137636 - DNA, 20 bp, Artificial Sequence
  mmSKRIPTE0008415_Flt3l_8
  gRNA
ctgctgagtccttgcctgcg

SEQ ID NO: 137637 - DNA, 20 bp, Artificial Sequence
  mmSKRIPTE0008416_Flt3l_9
  gRNA
gctggaacctccaagccccg

SEQ ID NO: 137638 - DNA, 20 bp, Artificial Sequence
  mmSKRIPTE0008417_Tdgf1_1
  gRNA
gatctccgtgtagaccggca

SEQ ID NO: 137639 - DNA, 20 bp, Artificial Sequence
  mmSKRIPTE0008418_Tdgf1_2
  gRNA
gtaagagtttattccgagcg

SEQ ID NO: 137640 - DNA, 20 bp, Artificial Sequence
  mmSKRIPTE0008419_Tdgf1_3
  gRNA
aagcagcaatgttactgaca

SEQ ID NO: 137641 - DNA, 20 bp, Artificial Sequence
  mmSKRIPTE0008420_Tdgf1_4
  gRNA
aggtctttccgagtactctg

SEQ ID NO: 137642 - DNA, 20 bp, Artificial Sequence
  mmSKRIPTE0008421_Tdgf1_5
  gRNA
tttgtgattgaggacttcgg

SEQ ID NO: 137643 - DNA, 20 bp, Artificial Sequence
  mmSKRIPTE0008422_Tdgf1_6
  gRNA
ccatccaccaccaagtaggg

SEQ ID NO: 137644 - DNA, 20 bp, Artificial Sequence
  mmSKRIPTE0008423_Tdgf1_7
  gRNA
ggctatgtttaacgacccag

SEQ ID NO: 137645 - DNA, 20 bp, Artificial Sequence
  mmSKRIPTE0008424_Tdgf1_8
  gRNA
tgttactggagacagcgcgg

SEQ ID NO: 137646 - DNA, 20 bp, Artificial Sequence
  mmSKRIPTE0008425_Tdgf1_9
  gRNA
cggcgtttgacacggagtcc

SEQ ID NO: 137647 - DNA, 20 bp, Artificial Sequence
  mmSKRIPTE0008426_Mlh1_1
  gRNA
cggtatgtcagtaatcacac

SEQ ID NO: 137648 - DNA, 20 bp, Artificial Sequence
  mmSKRIPTE0008427_Mlh1_2
  gRNA
cttgactgcaggttctcgaa

SEQ ID NO: 137649 - DNA, 20 bp, Artificial Sequence
  mmSKRIPTE0008428_Mlh1_3
  gRNA
aggaggtcctctctatgcaa

SEQ ID NO: 137650 - DNA, 20 bp, Artificial Sequence
  mmSKRIPTE0008429_Mlh1_4
  gRNA
agggcaccctgatcacggtg

SEQ ID NO: 137651 - DNA, 20 bp, Artificial Sequence
  mmSKRIPTE0008430_Mlh1_5
  gRNA
ctctgtcccgctctaaacag

SEQ ID NO: 137652 - DNA, 20 bp, Artificial Sequence
  mmSKRIPTE0008431_Mlh1_6
  gRNA
tggaaaaggccgaatcacca

SEQ ID NO: 137653 - DNA, 20 bp, Artificial Sequence
  mmSKRIPTE0008432_Mlh1_7
  gRNA
gacggtagtgaaccgcatag

SEQ ID NO: 137654 - DNA, 20 bp, Artificial Sequence
  mmSKRIPTE0008433_Mlh1_8
  gRNA
cactagtggaagtggcgaca

SEQ ID NO: 137655 - DNA, 20 bp, Artificial Sequence
  mmSKRIPTE0008434_Mlh1_9
  gRNA
atgtagcatcagatctgtcg

SEQ ID NO: 137656 - DNA, 20 bp, Artificial Sequence
  mmSKRIPTE0008435_Crp_1
  gRNA
gtgcggaaaagtctgcacaa

SEQ ID NO: 137657 - DNA, 20 bp, Artificial Sequence
  mmSKRIPTE0008436_Crp_2
  gRNA
aattccgtgctctagtgctg

SEQ ID NO: 137658 - DNA, 20 bp, Artificial Sequence
  mmSKRIPTE0008437_Crp_3
  gRNA
tgtttattaagccgcagctg

SEQ ID NO: 137659 - DNA, 20 bp, Artificial Sequence
  mmSKRIPTE0008438_Crp_4
  gRNA
cccgccagttcaaaacattg

SEQ ID NO: 137660 - DNA, 20 bp, Artificial Sequence
  mmSKRIPTE0008439_Crp_5
  gRNA
tccagcataagcatcccact

SEQ ID NO: 137661 - DNA, 20 bp, Artificial Sequence
  mmSKRIPTE0008440_Crp_6
  gRNA
aaggttcataacccgagaca

SEQ ID NO: 137662 - DNA, 20 bp, Artificial Sequence
  mmSKRIPTE0008441_Crp_7
  gRNA
ccagctgggagtctgctacg

SEQ ID NO: 137663 - DNA, 20 bp, Artificial Sequence
  mmSKRIPTE0008442_Crp_8
  gRNA
cagatgcaagcatcatcttg

SEQ ID NO: 137664 - DNA, 20 bp, Artificial Sequence
  mmSKRIPTE0008443_Crp_9
  gRNA
ggtctgacgtttaccccaag

SEQ ID NO: 137665 - DNA, 20 bp, Artificial Sequence
  mmSKRIPTE0008444_Stk11_1
  gRNA
gtacgagcgcctcagccaga

SEQ ID NO: 137666 - DNA, 20 bp, Artificial Sequence
  mmSKRIPTE0008445_Stk11_2
  gRNA
gacctcggtgttgccgaggt

SEQ ID NO: 137667 - DNA, 20 bp, Artificial Sequence
  mmSKRIPTE0008446_Stk11_3
  gRNA
tggagtatgagccggccaag

SEQ ID NO: 137668 - DNA, 20 bp, Artificial Sequence
  mmSKRIPTE0008447_Stk11_4
  gRNA
gtgctgcctaatctgtcgga

SEQ ID NO: 137669 - DNA, 20 bp, Artificial Sequence
  mmSKRIPTE0008448_Stk11_5
  gRNA
gtgatgttgtaacttcacat

SEQ ID NO: 137670 - DNA, 20 bp, Artificial Sequence
  mmSKRIPTE0008449_Stk11_6
  gRNA
gcgctgtggctgtcatcagt

SEQ ID NO: 137671 - DNA, 20 bp, Artificial Sequence
  mmSKRIPTE0008450_Stk11_7
  gRNA
tgggccactaaaattacaca

SEQ ID NO: 137672 - DNA, 20 bp, Artificial Sequence
  mmSKRIPTE0008451_Stk11_8
  gRNA
ggtggtctgttggcccagcg

SEQ ID NO: 137673 - DNA, 20 bp, Artificial Sequence
  mmSKRIPTE0008452_Stk11_9
  gRNA
taatctatgctgactccatg

SEQ ID NO: 137674 - DNA, 20 bp, Artificial Sequence
  mmSKRIPTE0008453_Il23a_1
  gRNA
tcattcagtgaactcgacac

SEQ ID NO: 137675 - DNA, 20 bp, Artificial Sequence
  mmSKRIPTE0008454_Il23a_2
  gRNA
tgcttgcaaaggatccgcca

SEQ ID NO: 137676 - DNA, 20 bp, Artificial Sequence
  mmSKRIPTE0008455_Il23a_3
  gRNA
aggtgtgaagttgctccatg

SEQ ID NO: 137677 - DNA, 20 bp, Artificial Sequence
  mmSKRIPTE0008456_Il23a_4
  gRNA
tgtcctatctcattccacga

SEQ ID NO: 137678 - DNA, 20 bp, Artificial Sequence
  mmSKRIPTE0008457_Il23a_5
  gRNA
tcaggaagccgcttagaagt

SEQ ID NO: 137679 - DNA, 20 bp, Artificial Sequence
  mmSKRIPTE0008458_Il23a_6
  gRNA
tagctttgtctgagatgacg

SEQ ID NO: 137680 - DNA, 20 bp, Artificial Sequence
  mmSKRIPTE0008459_Il23a_7
  gRNA
ctggaacgcacatgcaccag

SEQ ID NO: 137681 - DNA, 20 bp, Artificial Sequence
  mmSKRIPTE0008460_Il23a_8
  gRNA
gcatctgttgggtctcccgg

SEQ ID NO: 137682 - DNA, 20 bp, Artificial Sequence
  mmSKRIPTE0008461_Il23a_9
  gRNA
ccatcttcacactggatacg

SEQ ID NO: 137683 - DNA, 20 bp, Artificial Sequence
  mmSKRIPTE0008462_Vtn_1
  gRNA
agctagatgagacggcagtg

SEQ ID NO: 137684 - DNA, 20 bp, Artificial Sequence
  mmSKRIPTE0008463_Vtn_2
  gRNA
ggacgtgttcactatgccag

SEQ ID NO: 137685 - DNA, 20 bp, Artificial Sequence
  mmSKRIPTE0008464_Vtn_3
  gRNA
taacacgcttagcttagctg

SEQ ID NO: 137686 - DNA, 20 bp, Artificial Sequence
  mmSKRIPTE0008465_Vtn_4
  gRNA
caaccttagaacccggcgag

SEQ ID NO: 137687 - DNA, 20 bp, Artificial Sequence
  mmSKRIPTE0008466_Vtn_5
  gRNA
gccagtgacgtagatgcggc

SEQ ID NO: 137688 - DNA, 20 bp, Artificial Sequence
  mmSKRIPTE0008467_Vtn_6
  gRNA
cggtgacctaaatcctcgga

SEQ ID NO: 137689 - DNA, 20 bp, Artificial Sequence
  mmSKRIPTE0008468_Vtn_7
  gRNA
gaagggtgaggacataccgc

SEQ ID NO: 137690 - DNA, 20 bp, Artificial Sequence
  mmSKRIPTE0008469_Vtn_8
  gRNA
aagccttcggagatgtttcg

SEQ ID NO: 137691 - DNA, 20 bp, Artificial Sequence
  mmSKRIPTE0008470_Vtn_9
  gRNA
ttgctccactttaggcgctg

SEQ ID NO: 137692 - DNA, 20 bp, Artificial Sequence
  mmSKRIPTE0008471_Ccl7_1
  gRNA
tctcagaaagaacagcggtg

SEQ ID NO: 137693 - DNA, 20 bp, Artificial Sequence
  mmSKRIPTE0008472_Ccl7_2
  gRNA
cataatgttatgatactgtg

SEQ ID NO: 137694 - DNA, 20 bp, Artificial Sequence
  mmSKRIPTE0008473_Ccl7_3
  gRNA
ttataggcagccgataggga

SEQ ID NO: 137695 - DNA, 20 bp, Artificial Sequence
  mmSKRIPTE0008474_Ccl7_4
  gRNA
tcacccctgaagcagtacat

SEQ ID NO: 137696 - DNA, 20 bp, Artificial Sequence
  mmSKRIPTE0008475_Ccl7_5
  gRNA
tgggtcatgtcatcaacttg

SEQ ID NO: 137697 - DNA, 20 bp, Artificial Sequence
  mmSKRIPTE0008476_Ccl7_6
  gRNA
tcacaggagagtgtaatgtg

SEQ ID NO: 137698 - DNA, 20 bp, Artificial Sequence
  mmSKRIPTE0008477_Ccl7_7
  gRNA
gggccagacatggtaaccct

SEQ ID NO: 137699 - DNA, 20 bp, Artificial Sequence
  mmSKRIPTE0008478_Ccl7_8
  gRNA
aaatggtcacgcctaaggaa

SEQ ID NO: 137700 - DNA, 20 bp, Artificial Sequence
  mmSKRIPTE0008479_Ccl7_9
  gRNA
cacaacgttaaagtgacatg

SEQ ID NO: 137701 - DNA, 20 bp, Artificial Sequence
  mmSKRIPTE0008480_Ccl11_1
  gRNA
ggacgagttaggagtaactg

SEQ ID NO: 137702 - DNA, 20 bp, Artificial Sequence
  mmSKRIPTE0008481_Ccl11_2
  gRNA
ccccaggataatttgctatg

SEQ ID NO: 137703 - DNA, 20 bp, Artificial Sequence
  mmSKRIPTE0008482_Ccl11_3
  gRNA
tgcgactgatcattgtgcag

SEQ ID NO: 137704 - DNA, 20 bp, Artificial Sequence
  mmSKRIPTE0008483_Ccl11_4
  gRNA
cagcaggaatagaagcgctg

SEQ ID NO: 137705 - DNA, 20 bp, Artificial Sequence
  mmSKRIPTE0008484_Ccl11_5
  gRNA
ctctgggttagtgtcaagag

SEQ ID NO: 137706 - DNA, 20 bp, Artificial Sequence
  mmSKRIPTE0008485_Ccl11_6
  gRNA
atatcagcaccagtcgccca

SEQ ID NO: 137707 - DNA, 20 bp, Artificial Sequence
  mmSKRIPTE0008486_Ccl11_7
  gRNA
acagtacaaaggccatcatg

SEQ ID NO: 137708 - DNA, 20 bp, Artificial Sequence
  mmSKRIPTE0008487_Ccl11_8
  gRNA
tttcctaagacgtgctctga

SEQ ID NO: 137709 - DNA, 20 bp, Artificial Sequence
  mmSKRIPTE0008488_Ccl11_9
  gRNA
ccacggtcttcagcacagta

SEQ ID NO: 137710 - DNA, 20 bp, Artificial Sequence
  mmSKRIPTE0008489_Ngfr_1
  gRNA
tctctggatgcgtcgcaggg

SEQ ID NO: 137711 - DNA, 20 bp, Artificial Sequence
  mmSKRIPTE0008490_Ngfr_2
  gRNA
tataaaggttaagggtttcg

SEQ ID NO: 137712 - DNA, 20 bp, Artificial Sequence
  mmSKRIPTE0008491_Ngfr_3
  gRNA
attaactgtgtcagatctag

SEQ ID NO: 137713 - DNA, 20 bp, Artificial Sequence
  mmSKRIPTE0008492_Ngfr_4
  gRNA
ggacagtgagtctcttaggg

SEQ ID NO: 137714 - DNA, 20 bp, Artificial Sequence
  mmSKRIPTE0008493_Ngfr_5
  gRNA
cacaggccattggagaccga

SEQ ID NO: 137715 - DNA, 20 bp, Artificial Sequence
  mmSKRIPTE0008494_Ngfr_6
  gRNA
gtgacgtcagagccctccgg

SEQ ID NO: 137716 - DNA, 20 bp, Artificial Sequence
  mmSKRIPTE0008495_Ngfr_7
  gRNA
taggcccttacgacctccag

SEQ ID NO: 137717 - DNA, 20 bp, Artificial Sequence
  mmSKRIPTE0008496_Ngfr_8
  gRNA
ggagtcgggctaatgtcctg

SEQ ID NO: 137718 - DNA, 20 bp, Artificial Sequence
  mmSKRIPTE0008497_Ngfr_9
  gRNA
ggggctagaacatcagcggt

SEQ ID NO: 137719 - DNA, 20 bp, Artificial Sequence
  mmSKRIPTE0008498_Rnf31_1
  gRNA
gaagatgtgaaacaccgcgg

SEQ ID NO: 137720 - DNA, 20 bp, Artificial Sequence
  mmSKRIPTE0008499_Rnf31_2
  gRNA
aggttccgtagcattatggg

SEQ ID NO: 137721 - DNA, 20 bp, Artificial Sequence
  mmSKRIPTE0008500_Rnf31_3
  gRNA
ccaccgtgctgcgaaagacg

SEQ ID NO: 137722 - DNA, 20 bp, Artificial Sequence
  mmSKRIPTE0008501_Rnf31_4
  gRNA
gaaacagggcatatgcatcg

SEQ ID NO: 137723 - DNA, 20 bp, Artificial Sequence
  mmSKRIPTE0008502_Rnf31_5
  gRNA
agggtgttgaggtagtttcg

SEQ ID NO: 137724 - DNA, 20 bp, Artificial Sequence
  mmSKRIPTE0008503_Rnf31_6
  gRNA
atcctactgactgcgtaacg

SEQ ID NO: 137725 - DNA, 20 bp, Artificial Sequence
  mmSKRIPTE0008504_Rnf31_7
  gRNA
cttggaccttatcggagaag

SEQ ID NO: 137726 - DNA, 20 bp, Artificial Sequence
  mmSKRIPTE0008505_Rnf31_8
  gRNA
cagaggcttacccggttgcg

SEQ ID NO: 137727 - DNA, 20 bp, Artificial Sequence
  mmSKRIPTE0008506_Rnf31_9
  gRNA
ctgctcctcccactgcaaag

SEQ ID NO: 137728 - DNA, 20 bp, Artificial Sequence
  mmSKRIPTE0008507_Retnlg_1
  gRNA
tgagatgctttaatacaccg

SEQ ID NO: 137729 - DNA, 20 bp, Artificial Sequence
  mmSKRIPTE0008508_Retnlg_2
  gRNA
ggaactatagctcaggtccg

SEQ ID NO: 137730 - DNA, 20 bp, Artificial Sequence
  mmSKRIPTE0008509_Retnlg_3
  gRNA
aaggaacttcttgccaatcg

SEQ ID NO: 137731 - DNA, 20 bp, Artificial Sequence
  mmSKRIPTE0008510_Retnlg_4
  gRNA
ggggaccttagaatctattg

SEQ ID NO: 137732 - DNA, 20 bp, Artificial Sequence
  mmSKRIPTE0008511_Retnlg_5
  gRNA
ggatcttgggatatccggga

SEQ ID NO: 137733 - DNA, 20 bp, Artificial Sequence
  mmSKRIPTE0008512_Retnlg_6
  gRNA
cagttcggctggttagagtg

SEQ ID NO: 137734 - DNA, 20 bp, Artificial Sequence
  mmSKRIPTE0008513_Retnlg_7
  gRNA
gacaaccttaagatacaaga

SEQ ID NO: 137735 - DNA, 20 bp, Artificial Sequence
  mmSKRIPTE0008514_Retnlg_8
  gRNA
gctgtcatgtggtggcatga

SEQ ID NO: 137736 - DNA, 20 bp, Artificial Sequence
  mmSKRIPTE0008515_Retnlg_9
  gRNA
ccattgttgagcactgacag

SEQ ID NO: 137737 - DNA, 20 bp, Artificial Sequence
  mmSKRIPTE0008516_H2-K1_1
  gRNA
ggtgaaccgtcctagtgtag

SEQ ID NO: 137738 - DNA, 20 bp, Artificial Sequence
  mmSKRIPTE0008517_H2-K1_2
  gRNA
tagccgacttccatgtaccg

SEQ ID NO: 137739 - DNA, 20 bp, Artificial Sequence
  mmSKRIPTE0008518_H2-K1_3
  gRNA
cgaatcgccgacaggtgcga

SEQ ID NO: 137740 - DNA, 20 bp, Artificial Sequence
  mmSKRIPTE0008519_H2-K1_4
  gRNA
ggtcagcaaggtgactacaa

SEQ ID NO: 137741 - DNA, 20 bp, Artificial Sequence
  mmSKRIPTE0008520_H2-K1_5
  gRNA
gtgatcgcgccacccaatgg

SEQ ID NO: 137742 - DNA, 20 bp, Artificial Sequence
  mmSKRIPTE0008521_H2-K1_6
  gRNA
gctgatcaccaaacacaagt

SEQ ID NO: 137743 - DNA, 20 bp, Artificial Sequence
  mmSKRIPTE0008522_H2-K1_7
  gRNA
agaaccaatcagtgtcgccg

SEQ ID NO: 137744 - DNA, 20 bp, Artificial Sequence
  mmSKRIPTE0008523_H2-K1_8
  gRNA
cagctcttacccccattggg

SEQ ID NO: 137745 - DNA, 20 bp, Artificial Sequence
  mmSKRIPTE0008524_H2-K1_9
  gRNA
gagactcagggcctacctgg

SEQ ID NO: 137746 - DNA, 20 bp, Artificial Sequence
  mmSKRIPTE0008525_H2-M3_1
  gRNA
atccgctggaatactgcaca

SEQ ID NO: 137747 - DNA, 20 bp, Artificial Sequence
  mmSKRIPTE0008526_H2-M3_2
  gRNA
ccaaaggtgatgttaccttg

SEQ ID NO: 137748 - DNA, 20 bp, Artificial Sequence
  mmSKRIPTE0008527_H2-M3_3
  gRNA
tgtctacccagtgaacaggc

SEQ ID NO: 137749 - DNA, 20 bp, Artificial Sequence
  mmSKRIPTE0008528_H2-M3_4
  gRNA
agagtacttcagggcctatg

SEQ ID NO: 137750 - DNA, 20 bp, Artificial Sequence
  mmSKRIPTE0008529_H2-M3_5
  gRNA
ctattgttgtggtgtgcaag

SEQ ID NO: 137751 - DNA, 20 bp, Artificial Sequence
  mmSKRIPTE0008530_H2-M3_6
  gRNA
gtccaaatcctgttggcggg

SEQ ID NO: 137752 - DNA, 20 bp, Artificial Sequence
  mmSKRIPTE0008531_H2-M3_7
  gRNA
tttcctcctctgaagatcaa

SEQ ID NO: 137753 - DNA, 20 bp, Artificial Sequence
  mmSKRIPTE0008532_H2-M3_8
  gRNA
gcatcgggaccaggtgctcg

SEQ ID NO: 137754 - DNA, 20 bp, Artificial Sequence
  mmSKRIPTE0008533_H2-M3_9
  gRNA
cagactgccagtaagtatgg

SEQ ID NO: 137755 - DNA, 20 bp, Artificial Sequence
  mmSKRIPTE0008534_S100a8_1
  gRNA
actgaaaggaaaagtcgcag

SEQ ID NO: 137756 - DNA, 20 bp, Artificial Sequence
  mmSKRIPTE0008535_S100a8_2
  gRNA
gagctgacaaaggatatgtg

SEQ ID NO: 137757 - DNA, 20 bp, Artificial Sequence
  mmSKRIPTE0008536_S100a8_3
  gRNA
agtgtaggctctccttagcg

SEQ ID NO: 137758 - DNA, 20 bp, Artificial Sequence
  mmSKRIPTE0008537_S100a8_4
  gRNA
aagtaagcgaggactatctg

SEQ ID NO: 137759 - DNA, 20 bp, Artificial Sequence
  mmSKRIPTE0008538_S100a8_5
  gRNA
agcgttgtctccatagcccg

SEQ ID NO: 137760 - DNA, 20 bp, Artificial Sequence
  mmSKRIPTE0008539_S100a8_6
  gRNA
ttatctgagtggtacaggcc

SEQ ID NO: 137761 - DNA, 20 bp, Artificial Sequence
  mmSKRIPTE0008540_S100a8_7
  gRNA
agctgcagttactcacggca

SEQ ID NO: 137762 - DNA, 20 bp, Artificial Sequence
  mmSKRIPTE0008541_S100a8_8
  gRNA
cagcaccgatcaaatgcttg

SEQ ID NO: 137763 - DNA, 20 bp, Artificial Sequence
  mmSKRIPTE0008542_S100a8_9
  gRNA
aaaatggctctatctctgat

SEQ ID NO: 137764 - DNA, 20 bp, Artificial Sequence
  mmSKRIPTE0008543_Rorc_1
  gRNA
aattatacagtggaggttcg

SEQ ID NO: 137765 - DNA, 20 bp, Artificial Sequence
  mmSKRIPTE0008544_Rorc_2
  gRNA
gtcatctgggatccactacg

SEQ ID NO: 137766 - DNA, 20 bp, Artificial Sequence
  mmSKRIPTE0008545_Rorc_3
  gRNA
ctctgcaagactcatcgaca

SEQ ID NO: 137767 - DNA, 20 bp, Artificial Sequence
  mmSKRIPTE0008546_Rorc_4
  gRNA
ctgatgttgaatcccctgag

SEQ ID NO: 137768 - DNA, 20 bp, Artificial Sequence
  mmSKRIPTE0008547_Rorc_5
  gRNA
tgtccccacagatcttgcaa

SEQ ID NO: 137769 - DNA, 20 bp, Artificial Sequence
  mmSKRIPTE0008548_Rorc_6
  gRNA
tgcggctggttcggtcaatg

SEQ ID NO: 137770 - DNA, 20 bp, Artificial Sequence
  mmSKRIPTE0008549_Rorc_7
  gRNA
ggaccacctcaaactccgag

SEQ ID NO: 137771 - DNA, 20 bp, Artificial Sequence
  mmSKRIPTE0008550_Rorc_8
  gRNA
gaggttagaatatcttagtg

SEQ ID NO: 137772 - DNA, 20 bp, Artificial Sequence
  mmSKRIPTE0008551_Rorc_9
  gRNA
ccattgccaatccaaagcag

SEQ ID NO: 137773 - DNA, 20 bp, Artificial Sequence
  mmSKRIPTE0008552_Cmklr1_1
  gRNA
agactggattcgaatcgcag

SEQ ID NO: 137774 - DNA, 20 bp, Artificial Sequence
  mmSKRIPTE0008553_Cmklr1_2
  gRNA
catctgtcatctcacacgtg

SEQ ID NO: 137775 - DNA, 20 bp, Artificial Sequence
  mmSKRIPTE0008554_Cmklr1_3
  gRNA
ccacgtgtgccagctagggt

SEQ ID NO: 137776 - DNA, 20 bp, Artificial Sequence
  mmSKRIPTE0008555_Cmklr1_4
  gRNA
tttggatttcagaagaacgg

SEQ ID NO: 137777 - DNA, 20 bp, Artificial Sequence
  mmSKRIPTE0008556_Cmklr1_5
  gRNA
actcgcaagtagtttccaca

SEQ ID NO: 137778 - DNA, 20 bp, Artificial Sequence
  mmSKRIPTE0008557_Cmklr1_6
  gRNA
tgcgtgtagatgttcgcgca

SEQ ID NO: 137779 - DNA, 20 bp, Artificial Sequence
  mmSKRIPTE0008558_Cmklr1_7
  gRNA
gataggggatataagcgagt

SEQ ID NO: 137780 - DNA, 20 bp, Artificial Sequence
  mmSKRIPTE0008559_Cmklr1_8
  gRNA
taatcacaagggtcttatca

SEQ ID NO: 137781 - DNA, 20 bp, Artificial Sequence
  mmSKRIPTE0008560_Cmklr1_9
  gRNA
catcctcgtgggcatcccga

SEQ ID NO: 137782 - DNA, 20 bp, Artificial Sequence
  mmSKRIPTE0008561_Vegfc_1
  gRNA
ggttacctcagcaagacggt

SEQ ID NO: 137783 - DNA, 20 bp, Artificial Sequence
  mmSKRIPTE0008562_Vegfc_2
  gRNA
agccctttgagtgatcgggg

SEQ ID NO: 137784 - DNA, 20 bp, Artificial Sequence
  mmSKRIPTE0008563_Vegfc_3
  gRNA
tcaatacctgtcgagtcaca

SEQ ID NO: 137785 - DNA, 20 bp, Artificial Sequence
  mmSKRIPTE0008564_Vegfc_4
  gRNA
atcctcagcccgacccgacg

SEQ ID NO: 137786 - DNA, 20 bp, Artificial Sequence
  mmSKRIPTE0008565_Vegfc_5
  gRNA
acatctatacacacctcacg

SEQ ID NO: 137787 - DNA, 20 bp, Artificial Sequence
  mmSKRIPTE0008566_Vegfc_6
  gRNA
ggtgtacagagaacctgccg

SEQ ID NO: 137788 - DNA, 20 bp, Artificial Sequence
  mmSKRIPTE0008567_Vegfc_7
  gRNA
catgaatgacaataccagtg

SEQ ID NO: 137789 - DNA, 20 bp, Artificial Sequence
  mmSKRIPTE0008568_Vegfc_8
  gRNA
gacttaattcatactcactg

SEQ ID NO: 137790 - DNA, 20 bp, Artificial Sequence
  mmSKRIPTE0008569_Vegfc_9
  gRNA
catctgtagacggacacaca

SEQ ID NO: 137791 - DNA, 20 bp, Artificial Sequence
  mmSKRIPTE0008570_Nck1_1
  gRNA
cccgtggaacaagtaactca

SEQ ID NO: 137792 - DNA, 20 bp, Artificial Sequence
  mmSKRIPTE0008571_Nck1_2
  gRNA
tacatgaccagttaaagctg

SEQ ID NO: 137793 - DNA, 20 bp, Artificial Sequence
  mmSKRIPTE0008572_Nck1_3
  gRNA
agggaccaaggtgatcgtca

SEQ ID NO: 137794 - DNA, 20 bp, Artificial Sequence
  mmSKRIPTE0008573_Nck1_4
  gRNA
cttactcaaaacaggcacgc

SEQ ID NO: 137795 - DNA, 20 bp, Artificial Sequence
  mmSKRIPTE0008574_Nck1_5
  gRNA
ccgatctttacaagtgagca

SEQ ID NO: 137796 - DNA, 20 bp, Artificial Sequence
  mmSKRIPTE0008575_Nck1_6
  gRNA
ggcttccttaagccaaactg

SEQ ID NO: 137797 - DNA, 20 bp, Artificial Sequence
  mmSKRIPTE0008576_Nck1_7
  gRNA
cccgtgaaagggggtacttg

SEQ ID NO: 137798 - DNA, 20 bp, Artificial Sequence
  mmSKRIPTE0008577_Nck1_8
  gRNA
cagtatcactaaaagcacaa

SEQ ID NO: 137799 - DNA, 20 bp, Artificial Sequence
  mmSKRIPTE0008578_Nck1_9
  gRNA
gctacaacggacaaattgga

SEQ ID NO: 137800 - DNA, 20 bp, Artificial Sequence
  mmSKRIPTE0008579_Eif2ak4_1
  gRNA
agatagacgtgctgagccgt

SEQ ID NO: 137801 - DNA, 20 bp, Artificial Sequence
  mmSKRIPTE0008580_Eif2ak4_2
  gRNA
tggagttcatcgcaaagtag

SEQ ID NO: 137802 - DNA, 20 bp, Artificial Sequence
  mmSKRIPTE0008581_Eif2ak4_3
  gRNA
gctgtcatcaaggtacgaca

SEQ ID NO: 137803 - DNA, 20 bp, Artificial Sequence
  mmSKRIPTE0008582_Eif2ak4_4
  gRNA
tgtgttcacggaacaccgtg

SEQ ID NO: 137804 - DNA, 20 bp, Artificial Sequence
  mmSKRIPTE0008583_Eif2ak4_5
  gRNA
actacaacgcctggatcgag

SEQ ID NO: 137805 - DNA, 20 bp, Artificial Sequence
  mmSKRIPTE0008584_Eif2ak4_6
  gRNA
accgtcacatatttgctgtg

SEQ ID NO: 137806 - DNA, 20 bp, Artificial Sequence
  mmSKRIPTE0008585_Eif2ak4_7
  gRNA
aagctcgagcactctacatg

SEQ ID NO: 137807 - DNA, 20 bp, Artificial Sequence
  mmSKRIPTE0008586_Eif2ak4_8
  gRNA
aaaaggtgcaatgtgcacca

SEQ ID NO: 137808 - DNA, 20 bp, Artificial Sequence
  mmSKRIPTE0008587_Eif2ak4_9
  gRNA
tgaagtgctgcaccacacgc

SEQ ID NO: 137809 - DNA, 20 bp, Artificial Sequence
  mmSKRIPTE0008588_Apoa2_1
  gRNA
agcacagaatcggtatgctg

SEQ ID NO: 137810 - DNA, 20 bp, Artificial Sequence
  mmSKRIPTE0008589_Apoa2_2
  gRNA
ggtccccaaataatataccc

SEQ ID NO: 137811 - DNA, 20 bp, Artificial Sequence
  mmSKRIPTE0008590_Apoa2_3
  gRNA
tcttctcaaagtatgccctg

SEQ ID NO: 137812 - DNA, 20 bp, Artificial Sequence
  mmSKRIPTE0008591_Apoa2_4
  gRNA
gatcaggctggagtaaacaa

SEQ ID NO: 137813 - DNA, 20 bp, Artificial Sequence
  mmSKRIPTE0008592_Apoa2_5
  gRNA
attctccgtatcacctgacg

SEQ ID NO: 137814 - DNA, 20 bp, Artificial Sequence
  mmSKRIPTE0008593_Apoa2_6
  gRNA
caagcccagagtagacggga

SEQ ID NO: 137815 - DNA, 20 bp, Artificial Sequence
  mmSKRIPTE0008594_Apoa2_7
  gRNA
cagcagtttaatgaaccttg

SEQ ID NO: 137816 - DNA, 20 bp, Artificial Sequence
  mmSKRIPTE0008595_Apoa2_8
  gRNA
aggggcataaactctagtga

SEQ ID NO: 137817 - DNA, 20 bp, Artificial Sequence
  mmSKRIPTE0008596_Apoa2_9
  gRNA
aggttgagtgcatcaaccag

SEQ ID NO: 137818 - DNA, 20 bp, Artificial Sequence
  mmSKRIPTE0008597_Trp53_1
  gRNA
tttagccagggtgagcacgt

SEQ ID NO: 137819 - DNA, 20 bp, Artificial Sequence
  mmSKRIPTE0008598_Trp53_2
  gRNA
gggtgtctgtaaatcctgcg

SEQ ID NO: 137820 - DNA, 20 bp, Artificial Sequence
  mmSKRIPTE0008599_Trp53_3
  gRNA
taggtagcgactacagttag

SEQ ID NO: 137821 - DNA, 20 bp, Artificial Sequence
  mmSKRIPTE0008600_Trp53_4
  gRNA
gagggaacagacgcttaaca

SEQ ID NO: 137822 - DNA, 20 bp, Artificial Sequence
  mmSKRIPTE0008601_Trp53_5
  gRNA
aaaggcaccgtgagccgctg

SEQ ID NO: 137823 - DNA, 20 bp, Artificial Sequence
  mmSKRIPTE0008602_Trp53_6
  gRNA
agccctcaacaccgcctgtg

SEQ ID NO: 137824 - DNA, 20 bp, Artificial Sequence
  mmSKRIPTE0008603_Trp53_7
  gRNA
gtgaaatactctccatcaag

SEQ ID NO: 137825 - DNA, 20 bp, Artificial Sequence
  mmSKRIPTE0008604_Trp53_8
  gRNA
accaacttacaccataagac

SEQ ID NO: 137826 - DNA, 20 bp, Artificial Sequence
  mmSKRIPTE0008605_Trp53_9
  gRNA
taaaactagagaaaaccgtg

SEQ ID NO: 137827 - DNA, 20 bp, Artificial Sequence
  mmSKRIPTE0008606_Tac4_1
  gRNA
tggacaaacctctcgtgcca

SEQ ID NO: 137828 - DNA, 20 bp, Artificial Sequence
  mmSKRIPTE0008607_Tac4_2
  gRNA
ctcctgtgacaggtgcacaa

SEQ ID NO: 137829 - DNA, 20 bp, Artificial Sequence
  mmSKRIPTE0008608_Tac4_3
  gRNA
agaaagcctccagagtcgag

SEQ ID NO: 137830 - DNA, 20 bp, Artificial Sequence
  mmSKRIPTE0008609_Tac4_4
  gRNA
gggacggaattatgcaaccc

SEQ ID NO: 137831 - DNA, 20 bp, Artificial Sequence
  mmSKRIPTE0008610_Tac4_5
  gRNA
agggctattcagtagatgag

SEQ ID NO: 137832 - DNA, 20 bp, Artificial Sequence
  mmSKRIPTE0008611_Tac4_6
  gRNA
agtcaacagagggcacgacc

SEQ ID NO: 137833 - DNA, 20 bp, Artificial Sequence
  mmSKRIPTE0008612_Tac4_7
  gRNA
ttgatctgtccaactaccag

SEQ ID NO: 137834 - DNA, 20 bp, Artificial Sequence
  mmSKRIPTE0008613_Tac4_8
  gRNA
ctgggtgaccgtgaacctga

SEQ ID NO: 137835 - DNA, 20 bp, Artificial Sequence
  mmSKRIPTE0008614_Tac4_9
  gRNA
cacatacaagtggccccgtg

SEQ ID NO: 137836 - DNA, 20 bp, Artificial Sequence
  mmSKRIPTE0008615_Papd4_1
  gRNA
taaagcacctgaaaaaagcg

SEQ ID NO: 137837 - DNA, 20 bp, Artificial Sequence
  mmSKRIPTE0008616_Papd4_2
  gRNA
tacttatcctgagaactacg

SEQ ID NO: 137838 - DNA, 20 bp, Artificial Sequence
  mmSKRIPTE0008617_Papd4_3
  gRNA
caaccacttacggtatgcat

SEQ ID NO: 137839 - DNA, 20 bp, Artificial Sequence
  mmSKRIPTE0008618_Papd4_4
  gRNA
ccggaagatcaacgtgaccc

SEQ ID NO: 137840 - DNA, 20 bp, Artificial Sequence
  mmSKRIPTE0008619_Papd4_5
  gRNA
gcaaacgcgctctccagtgt

SEQ ID NO: 137841 - DNA, 20 bp, Artificial Sequence
  mmSKRIPTE0008620_Papd4_6
  gRNA
tcaccggcgtccacgccgaa

SEQ ID NO: 137842 - DNA, 20 bp, Artificial Sequence
  mmSKRIPTE0008621_Papd4_7
  gRNA
gataaatggttactagacag

SEQ ID NO: 137843 - DNA, 20 bp, Artificial Sequence
  mmSKRIPTE0008622_Papd4_8
  gRNA
cccttgtggtctcatacctg

SEQ ID NO: 137844 - DNA, 20 bp, Artificial Sequence
  mmSKRIPTE0008623_Papd4_9
  gRNA
tatcatctttagcatcaaca

SEQ ID NO: 137845 - DNA, 20 bp, Artificial Sequence
  mmSKRIPTE0008624_Mbl1_1
  gRNA
tgtctcaaccagagttggcg

SEQ ID NO: 137846 - DNA, 20 bp, Artificial Sequence
  mmSKRIPTE0008625_Mbl1_2
  gRNA
gctctttcgtggagtcactg

SEQ ID NO: 137847 - DNA, 20 bp, Artificial Sequence
  mmSKRIPTE0008626_Mbl1_3
  gRNA
cggatgtacaccagtctggg

SEQ ID NO: 137848 - DNA, 20 bp, Artificial Sequence
  mmSKRIPTE0008627_Mbl1_4
  gRNA
ctgaaggtacatcccaacca

SEQ ID NO: 137849 - DNA, 20 bp, Artificial Sequence
  mmSKRIPTE0008628_Mbl1_5
  gRNA
ctctggctttacatccagtg

SEQ ID NO: 137850 - DNA, 20 bp, Artificial Sequence
  mmSKRIPTE0008629_Mbl1_6
  gRNA
accacactaggccagaacct

SEQ ID NO: 137851 - DNA, 20 bp, Artificial Sequence
  mmSKRIPTE0008630_Mbl1_7
  gRNA
tcacggacgaggcgactgaa

SEQ ID NO: 137852 - DNA, 20 bp, Artificial Sequence
  mmSKRIPTE0008631_Mbl1_8
  gRNA
atcagggtcacaaacctgtg

SEQ ID NO: 137853 - DNA, 20 bp, Artificial Sequence
  mmSKRIPTE0008632_Mbl1_9
  gRNA
agttcatgtacgtgacaggg

SEQ ID NO: 137854 - DNA, 20 bp, Artificial Sequence
  mmSKRIPTE0008633_Lta_1
  gRNA
atccgggacttcaaggaccg

SEQ ID NO: 137855 - DNA, 20 bp, Artificial Sequence
  mmSKRIPTE0008634_Lta_2
  gRNA
gagactgataaggccgccac

SEQ ID NO: 137856 - DNA, 20 bp, Artificial Sequence
  mmSKRIPTE0008635_Lta_3
  gRNA
tagtctaagcccttagcctg

SEQ ID NO: 137857 - DNA, 20 bp, Artificial Sequence
  mmSKRIPTE0008636_Lta_4
  gRNA
atggtggattcacgggagtg

SEQ ID NO: 137858 - DNA, 20 bp, Artificial Sequence
  mmSKRIPTE0008637_Lta_5
  gRNA
gtgggccgcagggactagca

SEQ ID NO: 137859 - DNA, 20 bp, Artificial Sequence
  mmSKRIPTE0008638_Lta_6
  gRNA
tggggggctatcaagatcag

SEQ ID NO: 137860 - DNA, 20 bp, Artificial Sequence
  mmSKRIPTE0008639_Lta_7
  gRNA
gatcgtgcctttctccgaca

SEQ ID NO: 137861 - DNA, 20 bp, Artificial Sequence
  mmSKRIPTE0008640_Lta_8
  gRNA
gcgctcgggtccctttatag

SEQ ID NO: 137862 - DNA, 20 bp, Artificial Sequence
  mmSKRIPTE0008641_Lta_9
  gRNA
aggggactacatcttcccca

SEQ ID NO: 137863 - DNA, 20 bp, Artificial Sequence
  mmSKRIPTE0008642_Lime1_1
  gRNA
agactgcatgagctgcaccg

SEQ ID NO: 137864 - DNA, 20 bp, Artificial Sequence
  mmSKRIPTE0008643_Lime1_2
  gRNA
atccatgctagcaggccgtg

SEQ ID NO: 137865 - DNA, 20 bp, Artificial Sequence
  mmSKRIPTE0008644_Lime1_3
  gRNA
gggagaaggaacccactagt

SEQ ID NO: 137866 - DNA, 20 bp, Artificial Sequence
  mmSKRIPTE0008645_Lime1_4
  gRNA
tctgccgcttgggagtgatg

SEQ ID NO: 137867 - DNA, 20 bp, Artificial Sequence
  mmSKRIPTE0008646_Lime1_5
  gRNA
gaatcccaggcacatacctg

SEQ ID NO: 137868 - DNA, 20 bp, Artificial Sequence
  mmSKRIPTE0008647_Lime1_6
  gRNA
tacgaggccatcaatctcag

SEQ ID NO: 137869 - DNA, 20 bp, Artificial Sequence
  mmSKRIPTE0008648_Lime1_7
  gRNA
ctggacatctctagccagcg

SEQ ID NO: 137870 - DNA, 20 bp, Artificial Sequence
  mmSKRIPTE0008649_Lime1_8
  gRNA
tgagtgccagactgtcccag

SEQ ID NO: 137871 - DNA, 20 bp, Artificial Sequence
  mmSKRIPTE0008650_Lime1_9
  gRNA
cgatagagaagtccatatga

SEQ ID NO: 137872 - DNA, 20 bp, Artificial Sequence
  mmSKRIPTE0008651_Tlr2_1
  gRNA
tcactacgtctgactccgag

SEQ ID NO: 137873 - DNA, 20 bp, Artificial Sequence
  mmSKRIPTE0008652_Tlr2_2
  gRNA
gaaagtccagaggctccgtg

SEQ ID NO: 137874 - DNA, 20 bp, Artificial Sequence
  mmSKRIPTE0008653_Tlr2_3
  gRNA
agctggcgtctccatagtaa

SEQ ID NO: 137875 - DNA, 20 bp, Artificial Sequence
  mmSKRIPTE0008654_Tlr2_4
  gRNA
ccggaacgaagtcccgcttg

SEQ ID NO: 137876 - DNA, 20 bp, Artificial Sequence
  mmSKRIPTE0008655_Tlr2_5
  gRNA
agatgtcgttcaaggaggtg

SEQ ID NO: 137877 - DNA, 20 bp, Artificial Sequence
  mmSKRIPTE0008656_Tlr2_6
  gRNA
gtccagtacagggatccggg

SEQ ID NO: 137878 - DNA, 20 bp, Artificial Sequence
  mmSKRIPTE0008657_Tlr2_7
  gRNA
ctttgacgagaacaacgacg

SEQ ID NO: 137879 - DNA, 20 bp, Artificial Sequence
  mmSKRIPTE0008658_Tlr2_8
  gRNA
tagaaacagtcactatccgg

SEQ ID NO: 137880 - DNA, 20 bp, Artificial Sequence
  mmSKRIPTE0008659_Tlr2_9
  gRNA
atgaagaagctggcattccg

SEQ ID NO: 137881 - DNA, 20 bp, Artificial Sequence
  mmSKRIPTE0008660_S1pr1_1
  gRNA
agcttcgtccggcttgagcg

SEQ ID NO: 137882 - DNA, 20 bp, Artificial Sequence
  mmSKRIPTE0008661_S1pr1_2
  gRNA
tttctccaggcaaacgctag

SEQ ID NO: 137883 - DNA, 20 bp, Artificial Sequence
  mmSKRIPTE0008662_S1pr1_3
  gRNA
gcctggtgataccatgatgt

SEQ ID NO: 137884 - DNA, 20 bp, Artificial Sequence
  mmSKRIPTE0008663_S1pr1_4
  gRNA
aggcaagttgaacatcgggg

SEQ ID NO: 137885 - DNA, 20 bp, Artificial Sequence
  mmSKRIPTE0008664_S1pr1_5
  gRNA
cctcgcaggctccggctatg

SEQ ID NO: 137886 - DNA, 20 bp, Artificial Sequence
  mmSKRIPTE0008665_S1pr1_6
  gRNA
tcagagtccgtcccgcgctg

SEQ ID NO: 137887 - DNA, 20 bp, Artificial Sequence
  mmSKRIPTE0008666_S1pr1_7
  gRNA
tagctgctaattgtgtcccc

SEQ ID NO: 137888 - DNA, 20 bp, Artificial Sequence
  mmSKRIPTE0008667_S1pr1_8
  gRNA
gcagcaagatgcggatcgcg

SEQ ID NO: 137889 - DNA, 20 bp, Artificial Sequence
  mmSKRIPTE0008668_S1pr1_9
  gRNA
ggtgtccactagcatcccgg

SEQ ID NO: 137890 - DNA, 20 bp, Artificial Sequence
  mmSKRIPTE0008669_Pglyrp1_1
  gRNA
atgtgaccgagattcaccgg

SEQ ID NO: 137891 - DNA, 20 bp, Artificial Sequence
  mmSKRIPTE0008670_Pglyrp1_2
  gRNA
gcccagaagataaagtacac

SEQ ID NO: 137892 - DNA, 20 bp, Artificial Sequence
  mmSKRIPTE0008671_Pglyrp1_3
  gRNA
tgggtcggaaagtcccgccc

SEQ ID NO: 137893 - DNA, 20 bp, Artificial Sequence
  mmSKRIPTE0008672_Pglyrp1_4
  gRNA
tcagatccctaggtaaggga

SEQ ID NO: 137894 - DNA, 20 bp, Artificial Sequence
  mmSKRIPTE0008673_Pglyrp1_5
  gRNA
ggggcacccagttcgctacg

SEQ ID NO: 137895 - DNA, 20 bp, Artificial Sequence
  mmSKRIPTE0008674_Pglyrp1_6
  gRNA
gcccctaatacccaataccc

SEQ ID NO: 137896 - DNA, 20 bp, Artificial Sequence
  mmSKRIPTE0008675_Pglyrp1_7
  gRNA
gccccacctctggttaaagg

SEQ ID NO: 137897 - DNA, 20 bp, Artificial Sequence
  mmSKRIPTE0008676_Pglyrp1_8
  gRNA
gcggggcacgatgaaactgc

SEQ ID NO: 137898 - DNA, 20 bp, Artificial Sequence
  mmSKRIPTE0008677_Pglyrp1_9
  gRNA
atgcccactcacttggtgca

SEQ ID NO: 137899 - DNA, 20 bp, Artificial Sequence
  mmSKRIPTE0008678_Nlrp9a_1
  gRNA
caaacaataatatccgtgtg

SEQ ID NO: 137900 - DNA, 20 bp, Artificial Sequence
  mmSKRIPTE0008679_Nlrp9a_2
  gRNA
tataaggaccctatgcacct

SEQ ID NO: 137901 - DNA, 20 bp, Artificial Sequence
  mmSKRIPTE0008680_Nlrp9a_3
  gRNA
ctactaactaccatggcggg

SEQ ID NO: 137902 - DNA, 20 bp, Artificial Sequence
  mmSKRIPTE0008681_Nlrp9a_4
  gRNA
caaggagttaacttgctcag

SEQ ID NO: 137903 - DNA, 20 bp, Artificial Sequence
  mmSKRIPTE0008682_Nlrp9a_5
  gRNA
gcataacgtagtccaatgct

SEQ ID NO: 137904 - DNA, 20 bp, Artificial Sequence
  mmSKRIPTE0008683_Nlrp9a_6
  gRNA
agaactgctaccttatagca

SEQ ID NO: 137905 - DNA, 20 bp, Artificial Sequence
  mmSKRIPTE0008684_Nlrp9a_7
  gRNA
tgaagaaccagatatcgagg

SEQ ID NO: 137906 - DNA, 20 bp, Artificial Sequence
  mmSKRIPTE0008685_Nlrp9a_8
  gRNA
tttaagaaatactgtaaacg

SEQ ID NO: 137907 - DNA, 20 bp, Artificial Sequence
  mmSKRIPTE0008686_Nlrp9a_9
  gRNA
tttctcctaggagttgagcg

SEQ ID NO: 137908 - DNA, 20 bp, Artificial Sequence
  mmSKRIPTE0008687_Itgb1_1
  gRNA
gtggtcaatccgaagtatga

SEQ ID NO: 137909 - DNA, 20 bp, Artificial Sequence
  mmSKRIPTE0008688_Itgb1_2
  gRNA
ggtaccgcgctgaaccaccg

SEQ ID NO: 137910 - DNA, 20 bp, Artificial Sequence
  mmSKRIPTE0008689_Itgb1_3
  gRNA
gctactataagattaccccg

SEQ ID NO: 137911 - DNA, 20 bp, Artificial Sequence
  mmSKRIPTE0008690_Itgb1_4
  gRNA
tgaagctatcgtgcatgttg

SEQ ID NO: 137912 - DNA, 20 bp, Artificial Sequence
  mmSKRIPTE0008691_Itgb1_5
  gRNA
taatggccataccaatctaa

SEQ ID NO: 137913 - DNA, 20 bp, Artificial Sequence
  mmSKRIPTE0008692_Itgb1_6
  gRNA
acactgctagtgccaatgca

SEQ ID NO: 137914 - DNA, 20 bp, Artificial Sequence
  mmSKRIPTE0008693_Itgb1_7
  gRNA
agcacacacataccacgttg

SEQ ID NO: 137915 - DNA, 20 bp, Artificial Sequence
  mmSKRIPTE0008694_Itgb1_8
  gRNA
gagcccagtctgtcacaccg

SEQ ID NO: 137916 - DNA, 20 bp, Artificial Sequence
  mmSKRIPTE0008695_Itgb1_9
  gRNA
gctaaccaggcgtgtctctg

SEQ ID NO: 137917 - DNA, 20 bp, Artificial Sequence
  mmSKRIPTE0008696_Gata1_1
  gRNA
ggataaagccggaaaccacg

SEQ ID NO: 137918 - DNA, 20 bp, Artificial Sequence
  mmSKRIPTE0008697_Gata1_2
  gRNA
cagcagtagtgggaattgtg

SEQ ID NO: 137919 - DNA, 20 bp, Artificial Sequence
  mmSKRIPTE0008698_Gata1_3
  gRNA
ctctggcggaggaatgccag

SEQ ID NO: 137920 - DNA, 20 bp, Artificial Sequence
  mmSKRIPTE0008699_Gata1_4
  gRNA
ataggttgcccctaaaacgg

SEQ ID NO: 137921 - DNA, 20 bp, Artificial Sequence
  mmSKRIPTE0008700_Gata1_5
  gRNA
tggacaccttgaagacggag

SEQ ID NO: 137922 - DNA, 20 bp, Artificial Sequence
  mmSKRIPTE0008701_Gata1_6
  gRNA
agtcctatcaggccaacctg

SEQ ID NO: 137923 - DNA, 20 bp, Artificial Sequence
  mmSKRIPTE0008702_Gata1_7
  gRNA
gagcaacggctactccactg

SEQ ID NO: 137924 - DNA, 20 bp, Artificial Sequence
  mmSKRIPTE0008703_Gata1_8
  gRNA
gacgaggattggtacaaatg

SEQ ID NO: 137925 - DNA, 20 bp, Artificial Sequence
  mmSKRIPTE0008704_Gata1_9
  gRNA
aatccagacgaggaaccgca

SEQ ID NO: 137926 - DNA, 20 bp, Artificial Sequence
  mmSKRIPTE0008705_Il10_1
  gRNA
atcttattcgaattacagtg

SEQ ID NO: 137927 - DNA, 20 bp, Artificial Sequence
  mmSKRIPTE0008706_Il10_2
  gRNA
ttgagctcggatcagatcag

SEQ ID NO: 137928 - DNA, 20 bp, Artificial Sequence
  mmSKRIPTE0008707_Il10_3
  gRNA
ttcggagagaggtacaaacg

SEQ ID NO: 137929 - DNA, 20 bp, Artificial Sequence
  mmSKRIPTE0008708_Il10_4
  gRNA
tatttcggtagggactgagg

SEQ ID NO: 137930 - DNA, 20 bp, Artificial Sequence
  mmSKRIPTE0008709_Il10_5
  gRNA
ccaagcgattagggacggga

SEQ ID NO: 137931 - DNA, 20 bp, Artificial Sequence
  mmSKRIPTE0008710_Il10_6
  gRNA
cggctgggggatgacagtag

SEQ ID NO: 137932 - DNA, 20 bp, Artificial Sequence
  mmSKRIPTE0008711_Il10_7
  gRNA
ggcaacccaagtaaccctag

SEQ ID NO: 137933 - DNA, 20 bp, Artificial Sequence
  mmSKRIPTE0008712_Il10_8
  gRNA
gtaagcgctaaagaactggt

SEQ ID NO: 137934 - DNA, 20 bp, Artificial Sequence
  mmSKRIPTE0008713_Il10_9
  gRNA
actcaccaaagcgcagaagg

SEQ ID NO: 137935 - DNA, 20 bp, Artificial Sequence
  mmSKRIPTE0008714_Dusp3_1
  gRNA
gtaggcgataactagcgttg

SEQ ID NO: 137936 - DNA, 20 bp, Artificial Sequence
  mmSKRIPTE0008715_Dusp3_2
  gRNA
gctcctccgcttcatgcgcg

SEQ ID NO: 137937 - DNA, 20 bp, Artificial Sequence
  mmSKRIPTE0008716_Dusp3_3
  gRNA
aggccaattacacctgcagt

SEQ ID NO: 137938 - DNA, 20 bp, Artificial Sequence
  mmSKRIPTE0008717_Dusp3_4
  gRNA
tcttcagcattctgtcaacg

SEQ ID NO: 137939 - DNA, 20 bp, Artificial Sequence
  mmSKRIPTE0008718_Dusp3_5
  gRNA
aatgaacaggcagccccgga

SEQ ID NO: 137940 - DNA, 20 bp, Artificial Sequence
  mmSKRIPTE0008719_Dusp3_6
  gRNA
acgggctccttattgccaag

SEQ ID NO: 137941 - DNA, 20 bp, Artificial Sequence
  mmSKRIPTE0008720_Dusp3_7
  gRNA
tgtcctacatgtgagccgat

SEQ ID NO: 137942 - DNA, 20 bp, Artificial Sequence
  mmSKRIPTE0008721_Dusp3_8
  gRNA
gctgaatgagagctggctag

SEQ ID NO: 137943 - DNA, 20 bp, Artificial Sequence
  mmSKRIPTE0008722_Dusp3_9
  gRNA
gcggcaggaagacttaaccc

SEQ ID NO: 137944 - DNA, 20 bp, Artificial Sequence
  mmSKRIPTE0008723_Ighg2c_1
  gRNA
gacaaggacatctatcctag

SEQ ID NO: 137945 - DNA, 20 bp, Artificial Sequence
  mmSKRIPTE0008724_Ighg2c_2
  gRNA
gggagatggtcttagtcgta

SEQ ID NO: 137946 - DNA, 20 bp, Artificial Sequence
  mmSKRIPTE0008725_Ighg2c_3
  gRNA
agacggatggtccacccaag

SEQ ID NO: 137947 - DNA, 20 bp, Artificial Sequence
  mmSKRIPTE0008726_Ighg2c_4
  gRNA
acgtcctactacatctgggg

SEQ ID NO: 137948 - DNA, 20 bp, Artificial Sequence
  mmSKRIPTE0008727_Ighg2c_5
  gRNA
caggcatcctagagtcaccg

SEQ ID NO: 137949 - DNA, 20 bp, Artificial Sequence
  mmSKRIPTE0008728_Ighg2c_6
  gRNA
gtggcctcataaatttggag

SEQ ID NO: 137950 - DNA, 20 bp, Artificial Sequence
  mmSKRIPTE0008729_Ighg2c_7
  gRNA
gccagtgtccattaggaccc

SEQ ID NO: 137951 - DNA, 20 bp, Artificial Sequence
  mmSKRIPTE0008730_Ighg2c_8
  gRNA
gcatcattggagtcagctgg

SEQ ID NO: 137952 - DNA, 20 bp, Artificial Sequence
  mmSKRIPTE0008731_Ighg2c_9
  gRNA
ggtgattgtgcagaccctcg

SEQ ID NO: 137953 - DNA, 20 bp, Artificial Sequence
  mmSKRIPTE0008732_Naip2_1
  gRNA
gaggttaacacttcaatgtg

SEQ ID NO: 137954 - DNA, 20 bp, Artificial Sequence
  mmSKRIPTE0008733_Naip2_2
  gRNA
gaaattggtgagtgtcgaag

SEQ ID NO: 137955 - DNA, 20 bp, Artificial Sequence
  mmSKRIPTE0008734_Naip2_3
  gRNA
gactcagcaacacgattgtg

SEQ ID NO: 137956 - DNA, 20 bp, Artificial Sequence
  mmSKRIPTE0008735_Naip2_4
  gRNA
atgaaccagagtctgcggaa

SEQ ID NO: 137957 - DNA, 20 bp, Artificial Sequence
  mmSKRIPTE0008736_Naip2_5
  gRNA
tctccaaactaggtaaggga

SEQ ID NO: 137958 - DNA, 20 bp, Artificial Sequence
  mmSKRIPTE0008737_Naip2_6
  gRNA
atgcttgtgtcaaaactggg

SEQ ID NO: 137959 - DNA, 20 bp, Artificial Sequence
  mmSKRIPTE0008738_Naip2_7
  gRNA
acagccccgggtgattcgtg

SEQ ID NO: 137960 - DNA, 20 bp, Artificial Sequence
  mmSKRIPTE0008739_Naip2_8
  gRNA
tcattgcaggaaaccacccg

SEQ ID NO: 137961 - DNA, 20 bp, Artificial Sequence
  mmSKRIPTE0008740_Naip2_9
  gRNA
gaatccatggtggatgcatg

SEQ ID NO: 137962 - DNA, 20 bp, Artificial Sequence
  mmSKRIPTE0008741_H2-Q4_1
  gRNA
ggaaccaatcatcgtcgccg

SEQ ID NO: 137963 - DNA, 20 bp, Artificial Sequence
  mmSKRIPTE0008742_H2-Q4_2
  gRNA
gttctgagcagaacggacgc

SEQ ID NO: 137964 - DNA, 20 bp, Artificial Sequence
  mmSKRIPTE0008743_H2-Q4_3
  gRNA
gggtgagtaccgggtccgga

SEQ ID NO: 137965 - DNA, 20 bp, Artificial Sequence
  mmSKRIPTE0008744_H2-Q4_4
  gRNA
ggtgatcacgtcacccaatg

SEQ ID NO: 137966 - DNA, 20 bp, Artificial Sequence
  mmSKRIPTE0008745_H2-Q4_5
  gRNA
aaatcccacaattagctggt

SEQ ID NO: 137967 - DNA, 20 bp, Artificial Sequence
  mmSKRIPTE0008746_H2-Q4_6
  gRNA
gcaatgatggccaagctcca

SEQ ID NO: 137968 - DNA, 20 bp, Artificial Sequence
  mmSKRIPTE0008747_H2-Q4_7
  gRNA
atttctacacctccgtgtcc

SEQ ID NO: 137969 - DNA, 20 bp, Artificial Sequence
  mmSKRIPTE0008748_H2-Q4_8
  gRNA
tgacatcaccgtcagatctg

SEQ ID NO: 137970 - DNA, 20 bp, Artificial Sequence
  mmSKRIPTE0008749_H2-Q4_9
  gRNA
gtttccactgcagacccgga

SEQ ID NO: 137971 - DNA, 20 bp, Artificial Sequence
  mmSKRIPTE0008750_H2-M10.5_1
  gRNA
cagtgagacagcaagcgttg

SEQ ID NO: 137972 - DNA, 20 bp, Artificial Sequence
  mmSKRIPTE0008751_H2-M10.5_2
  gRNA
gagattcatccatagtcgaa

SEQ ID NO: 137973 - DNA, 20 bp, Artificial Sequence
  mmSKRIPTE0008752_H2-M10.5_3
  gRNA
gtggtatgcctatggacctg

SEQ ID NO: 137974 - DNA, 20 bp, Artificial Sequence
  mmSKRIPTE0008753_H2-M10.5_4
  gRNA
aatttggggacaaaatcccg

SEQ ID NO: 137975 - DNA, 20 bp, Artificial Sequence
  mmSKRIPTE0008754_H2-M10.5_5
  gRNA
tgagccggaagtgaccgccg

SEQ ID NO: 137976 - DNA, 20 bp, Artificial Sequence
  mmSKRIPTE0008755_H2-M10.5_6
  gRNA
ttacctgcaaggagtgtgcg

SEQ ID NO: 137977 - DNA, 20 bp, Artificial Sequence
  mmSKRIPTE0008756_H2-M10.5_7
  gRNA
catgttgagtcaggacaccg

SEQ ID NO: 137978 - DNA, 20 bp, Artificial Sequence
  mmSKRIPTE0008757_H2-M10.5_8
  gRNA
atgctgcattgccataggca

SEQ ID NO: 137979 - DNA, 20 bp, Artificial Sequence
  mmSKRIPTE0008758_H2-M10.5_9
  gRNA
gcgagggtctggttaggcaa

SEQ ID NO: 137980 - DNA, 20 bp, Artificial Sequence
  mmSKRIPTE0008759_Hells_1
  gRNA
tctttcgcgggaaaacccgg

SEQ ID NO: 137981 - DNA, 20 bp, Artificial Sequence
  mmSKRIPTE0008760_Hells_2
  gRNA
gggtgtgaggatttagctcg

SEQ ID NO: 137982 - DNA, 20 bp, Artificial Sequence
  mmSKRIPTE0008761_Hells_3
  gRNA
gctctgtaatgattattacg

SEQ ID NO: 137983 - DNA, 20 bp, Artificial Sequence
  mmSKRIPTE0008762_Hells_4
  gRNA
ggtaatgtaaagtccacggc

SEQ ID NO: 137984 - DNA, 20 bp, Artificial Sequence
  mmSKRIPTE0008763_Hells_5
  gRNA
ctggtgccaataacagaaga

SEQ ID NO: 137985 - DNA, 20 bp, Artificial Sequence
  mmSKRIPTE0008764_Hells_6
  gRNA
agaagaataaattgacgaca

SEQ ID NO: 137986 - DNA, 20 bp, Artificial Sequence
  mmSKRIPTE0008765_Hells_7
  gRNA
cgtccaaatctcgtgagccg

SEQ ID NO: 137987 - DNA, 20 bp, Artificial Sequence
  mmSKRIPTE0008766_Hells_8
  gRNA
ttagatatacagtttcaaca

SEQ ID NO: 137988 - DNA, 20 bp, Artificial Sequence
  mmSKRIPTE0008767_Hells_9
  gRNA
taatagtagatgaaggacac

SEQ ID NO: 137989 - DNA, 20 bp, Artificial Sequence
  mmSKRIPTE0008768_Chuk_1
  gRNA
gtagaagacctcccttcccg

SEQ ID NO: 137990 - DNA, 20 bp, Artificial Sequence
  mmSKRIPTE0008769_Chuk_2
  gRNA
ctccctggcgtcgtccatag

SEQ ID NO: 137991 - DNA, 20 bp, Artificial Sequence
  mmSKRIPTE0008770_Chuk_3
  gRNA
aataggaaccgcacgcacga

SEQ ID NO: 137992 - DNA, 20 bp, Artificial Sequence
  mmSKRIPTE0008771_Chuk_4
  gRNA
aaaagtccaaccccttacac

SEQ ID NO: 137993 - DNA, 20 bp, Artificial Sequence
  mmSKRIPTE0008772_Chuk_5
  gRNA
aaaccgataccgataagtca

SEQ ID NO: 137994 - DNA, 20 bp, Artificial Sequence
  mmSKRIPTE0008773_Chuk_6
  gRNA
gcatccacactaccttccgg

SEQ ID NO: 137995 - DNA, 20 bp, Artificial Sequence
  mmSKRIPTE0008774_Chuk_7
  gRNA
tcttgaaggttgatgtagtg

SEQ ID NO: 137996 - DNA, 20 bp, Artificial Sequence
  mmSKRIPTE0008775_Chuk_8
  gRNA
ggtaaggtgaggtccactaa

SEQ ID NO: 137997 - DNA, 20 bp, Artificial Sequence
  mmSKRIPTE0008776_Chuk_9
  gRNA
aggggcgcttagtgtgactg

SEQ ID NO: 137998 - DNA, 20 bp, Artificial Sequence
  mmSKRIPTE0008777_Kynu_1
  gRNA
ccataatctcatattccctg

SEQ ID NO: 137999 - DNA, 20 bp, Artificial Sequence
  mmSKRIPTE0008778_Kynu_2
  gRNA
atgtgtttgggcatacgctg

SEQ ID NO: 138000 - DNA, 20 bp, Artificial Sequence
  mmSKRIPTE0008779_Kynu_3
  gRNA
ctttgagctctgtaggcgag

SEQ ID NO: 138001 - DNA, 20 bp, Artificial Sequence
  mmSKRIPTE0008780_Kynu_4
  gRNA
cttggagacactactcacgc

SEQ ID NO: 138002 - DNA, 20 bp, Artificial Sequence
  mmSKRIPTE0008781_Kynu_5
  gRNA
gcacagcaccgttaatagag

SEQ ID NO: 138003 - DNA, 20 bp, Artificial Sequence
  mmSKRIPTE0008782_Kynu_6
  gRNA
agctgattgaaaagtatacg

SEQ ID NO: 138004 - DNA, 20 bp, Artificial Sequence
  mmSKRIPTE0008783_Kynu_7
  gRNA
atcctccttaatgtgaatca

SEQ ID NO: 138005 - DNA, 20 bp, Artificial Sequence
  mmSKRIPTE0008784_Kynu_8
  gRNA
aaagaacacgaggctcgggt

SEQ ID NO: 138006 - DNA, 20 bp, Artificial Sequence
  mmSKRIPTE0008785_Kynu_9
  gRNA
gagctaatgtgactgcaacg

SEQ ID NO: 138007 - DNA, 20 bp, Artificial Sequence
  mmSKRIPTE0008786_Gbp2b_1
  gRNA
gctcaccggagttcttgatg

SEQ ID NO: 138008 - DNA, 20 bp, Artificial Sequence
  mmSKRIPTE0008787_Gbp2b_2
  gRNA
aggtagagggatgacttacg

SEQ ID NO: 138009 - DNA, 20 bp, Artificial Sequence
  mmSKRIPTE0008788_Gbp2b_3
  gRNA
tactggagaatgtctaactg

SEQ ID NO: 138010 - DNA, 20 bp, Artificial Sequence
  mmSKRIPTE0008789_Gbp2b_4
  gRNA
cagctgttggtagcatattg

SEQ ID NO: 138011 - DNA, 20 bp, Artificial Sequence
  mmSKRIPTE0008790_Gbp2b_5
  gRNA
aggactgcgttctccataca

SEQ ID NO: 138012 - DNA, 20 bp, Artificial Sequence
  mmSKRIPTE0008791_Gbp2b_6
  gRNA
ttggttcccagggtagacaa

SEQ ID NO: 138013 - DNA, 20 bp, Artificial Sequence
  mmSKRIPTE0008792_Gbp2b_7
  gRNA
taaagtatggtgcatgatcg

SEQ ID NO: 138014 - DNA, 20 bp, Artificial Sequence
  mmSKRIPTE0008793_Gbp2b_8
  gRNA
gtgtatcacttacctaacat

SEQ ID NO: 138015 - DNA, 20 bp, Artificial Sequence
  mmSKRIPTE0008794_Gbp2b_9
  gRNA
tggagggacaataaaacacc

SEQ ID NO: 138016 - DNA, 20 bp, Artificial Sequence
  mmSKRIPTE0008795_Edn2_1
  gRNA
tgactctaatagctcccacg

SEQ ID NO: 138017 - DNA, 20 bp, Artificial Sequence
  mmSKRIPTE0008796_Edn2_2
  gRNA
actgggggcatagagcggtg

SEQ ID NO: 138018 - DNA, 20 bp, Artificial Sequence
  mmSKRIPTE0008797_Edn2_3
  gRNA
acggcctgggaaacccgcca

SEQ ID NO: 138019 - DNA, 20 bp, Artificial Sequence
  mmSKRIPTE0008798_Edn2_4
  gRNA
gtaagcatccaccaggaccg

SEQ ID NO: 138020 - DNA, 20 bp, Artificial Sequence
  mmSKRIPTE0008799_Edn2_5
  gRNA
aggagcatcgacgaaaacgc

SEQ ID NO: 138021 - DNA, 20 bp, Artificial Sequence
  mmSKRIPTE0008800_Edn2_6
  gRNA
gggatcgcaacacgcgagag

SEQ ID NO: 138022 - DNA, 20 bp, Artificial Sequence
  mmSKRIPTE0008801_Edn2_7
  gRNA
tggccgcctcttataatacc

SEQ ID NO: 138023 - DNA, 20 bp, Artificial Sequence
  mmSKRIPTE0008802_Edn2_8
  gRNA
attcattgatgtctcctccg

SEQ ID NO: 138024 - DNA, 20 bp, Artificial Sequence
  mmSKRIPTE0008803_Edn2_9
  gRNA
gagagcccataagtacactg

SEQ ID NO: 138025 - DNA, 20 bp, Artificial Sequence
  mmSKRIPTE0008804_Mir17_1
  gRNA
tcgtcggtcagtcggtcgcg

SEQ ID NO: 138026 - DNA, 20 bp, Artificial Sequence
  mmSKRIPTE0008805_Mir17_2
  gRNA
attacagcttatacccaagg

SEQ ID NO: 138027 - DNA, 20 bp, Artificial Sequence
  mmSKRIPTE0008806_Mir17_3
  gRNA
gaataaagtgaacctcacct

SEQ ID NO: 138028 - DNA, 20 bp, Artificial Sequence
  mmSKRIPTE0008807_Mir17_4
  gRNA
tgtgtgcatctactgcagtg

SEQ ID NO: 138029 - DNA, 20 bp, Artificial Sequence
  mmSKRIPTE0008808_Mir17_5
  gRNA
atgctgacagctgcctcggt

SEQ ID NO: 138030 - DNA, 20 bp, Artificial Sequence
  mmSKRIPTE0008809_Mir17_6
  gRNA
acataacttcttatgccaga

SEQ ID NO: 138031 - DNA, 20 bp, Artificial Sequence
  mmSKRIPTE0008810_Mir17_7
  gRNA
aaaaagcacgcagcaccagc

SEQ ID NO: 138032 - DNA, 20 bp, Artificial Sequence
  mmSKRIPTE0008811_Mir17_8
  gRNA
cactttgacattattctgac

SEQ ID NO: 138033 - DNA, 20 bp, Artificial Sequence
  mmSKRIPTE0008812_Slamf8_1
  gRNA
taggggagcagcagacgggt

SEQ ID NO: 138034 - DNA, 20 bp, Artificial Sequence
  mmSKRIPTE0008813_Slamf8_2
  gRNA
cagacactactaatagtaca

SEQ ID NO: 138035 - DNA, 20 bp, Artificial Sequence
  mmSKRIPTE0008814_Slamf8_3
  gRNA
ctagttcaccttgcccagag

SEQ ID NO: 138036 - DNA, 20 bp, Artificial Sequence
  mmSKRIPTE0008815_Slamf8_4
  gRNA
agatggacaacctgtcctcg

SEQ ID NO: 138037 - DNA, 20 bp, Artificial Sequence
  mmSKRIPTE0008816_Slamf8_5
  gRNA
tccggcatgtgcgaacagga

SEQ ID NO: 138038 - DNA, 20 bp, Artificial Sequence
  mmSKRIPTE0008817_Slamf8_6
  gRNA
tcacgcacttggaagcccgg

SEQ ID NO: 138039 - DNA, 20 bp, Artificial Sequence
  mmSKRIPTE0008818_Slamf8_7
  gRNA
tgttccctgacttagcaacg

SEQ ID NO: 138040 - DNA, 20 bp, Artificial Sequence
  mmSKRIPTE0008819_Slamf8_8
  gRNA
gtatgacaggcgatgcaaag

SEQ ID NO: 138041 - DNA, 20 bp, Artificial Sequence
  mmSKRIPTE0008820_Slamf8_9
  gRNA
accgtacaccttgagataca

SEQ ID NO: 138042 - DNA, 20 bp, Artificial Sequence
  mmSKRIPTE0008821_Aim2_1
  gRNA
tgccaggagcacactcgacg

SEQ ID NO: 138043 - DNA, 20 bp, Artificial Sequence
  mmSKRIPTE0008822_Aim2_2
  gRNA
taattggaaacttaacgaca

SEQ ID NO: 138044 - DNA, 20 bp, Artificial Sequence
  mmSKRIPTE0008823_Aim2_3
  gRNA
aaaatgttaactgcttgccg

SEQ ID NO: 138045 - DNA, 20 bp, Artificial Sequence
  mmSKRIPTE0008824_Aim2_4
  gRNA
aaactgcggaaatggcaggt

SEQ ID NO: 138046 - DNA, 20 bp, Artificial Sequence
  mmSKRIPTE0008825_Aim2_5
  gRNA
cttgtcggagagacgcctgt

SEQ ID NO: 138047 - DNA, 20 bp, Artificial Sequence
  mmSKRIPTE0008826_Aim2_6
  gRNA
cggcctggaccacatcacgg

SEQ ID NO: 138048 - DNA, 20 bp, Artificial Sequence
  mmSKRIPTE0008827_Aim2_7
  gRNA
gcgcggaggtggatagtcca

SEQ ID NO: 138049 - DNA, 20 bp, Artificial Sequence
  mmSKRIPTE0008828_Aim2_8
  gRNA
tccatgcagtagaagcgcaa

SEQ ID NO: 138050 - DNA, 20 bp, Artificial Sequence
  mmSKRIPTE0008829_Aim2_9
  gRNA
atatctctcctatcgtagcc

SEQ ID NO: 138051 - DNA, 20 bp, Artificial Sequence
  mmSKRIPTE0008830_H60b_1
  gRNA
actgtccatgtagagtacga

SEQ ID NO: 138052 - DNA, 20 bp, Artificial Sequence
  mmSKRIPTE0008831_H60b_2
  gRNA
ttgttgactttggaccagag

SEQ ID NO: 138053 - DNA, 20 bp, Artificial Sequence
  mmSKRIPTE0008832_H60b_3
  gRNA
gtactcaccagttgacagtg

SEQ ID NO: 138054 - DNA, 20 bp, Artificial Sequence
  mmSKRIPTE0008833_H60b_4
  gRNA
tgcatcccaaggaactcatg

SEQ ID NO: 138055 - DNA, 20 bp, Artificial Sequence
  mmSKRIPTE0008834_H60b_5
  gRNA
ttcaggactcccacaccccg

SEQ ID NO: 138056 - DNA, 20 bp, Artificial Sequence
  mmSKRIPTE0008835_H60b_6
  gRNA
acaagtacctggctaagtca

SEQ ID NO: 138057 - DNA, 20 bp, Artificial Sequence
  mmSKRIPTE0008836_H60b_7
  gRNA
agcatctgagaaatagactg

SEQ ID NO: 138058 - DNA, 20 bp, Artificial Sequence
  mmSKRIPTE0008837_H60b_8
  gRNA
ggaatgagaaaggctctgcg

SEQ ID NO: 138059 - DNA, 20 bp, Artificial Sequence
  mmSKRIPTE0008838_H60b_9
  gRNA
gtggacaacagccactgtga

SEQ ID NO: 138060 - DNA, 20 bp, Artificial Sequence
  mmSKRIPTE0008839_Barx1_1
  gRNA
gcccagcgaccgaaattgcg

SEQ ID NO: 138061 - DNA, 20 bp, Artificial Sequence
  mmSKRIPTE0008840_Barx1_2
  gRNA
agtcaccgtctttgtaagag

SEQ ID NO: 138062 - DNA, 20 bp, Artificial Sequence
  mmSKRIPTE0008841_Barx1_3
  gRNA
gcgggcttccgaattcgtga

SEQ ID NO: 138063 - DNA, 20 bp, Artificial Sequence
  mmSKRIPTE0008842_Barx1_4
  gRNA
atgaagctgcggtagcgatg

SEQ ID NO: 138064 - DNA, 20 bp, Artificial Sequence
  mmSKRIPTE0008843_Barx1_5
  gRNA
agagtaacgcacaccctcag

SEQ ID NO: 138065 - DNA, 20 bp, Artificial Sequence
  mmSKRIPTE0008844_Barx1_6
  gRNA
tccttcaggtagctatcccg

SEQ ID NO: 138066 - DNA, 20 bp, Artificial Sequence
  mmSKRIPTE0008845_Barx1_7
  gRNA
caaacggcatggacgcggaa

SEQ ID NO: 138067 - DNA, 20 bp, Artificial Sequence
  mmSKRIPTE0008846_Barx1_8
  gRNA
ccaaacgcagcaaagcgctg

SEQ ID NO: 138068 - DNA, 20 bp, Artificial Sequence
  mmSKRIPTE0008847_Barx1_9
  gRNA
agagacgactctgctctgca

SEQ ID NO: 138069 - DNA, 20 bp, Artificial Sequence
  mmSKRIPTE0008848_Fga_1
  gRNA
atggaaaggaaaccaatcga

SEQ ID NO: 138070 - DNA, 20 bp, Artificial Sequence
  mmSKRIPTE0008849_Fga_2
  gRNA
gccagagctcgcccaacgag

SEQ ID NO: 138071 - DNA, 20 bp, Artificial Sequence
  mmSKRIPTE0008850_Fga_3
  gRNA
acttaagtccggaaatgcga

SEQ ID NO: 138072 - DNA, 20 bp, Artificial Sequence
  mmSKRIPTE0008851_Fga_4
  gRNA
ccaaccctacttaaaccggc

SEQ ID NO: 138073 - DNA, 20 bp, Artificial Sequence
  mmSKRIPTE0008852_Fga_5
  gRNA
caagatctctcgttatccta

SEQ ID NO: 138074 - DNA, 20 bp, Artificial Sequence
  mmSKRIPTE0008853_Fga_6
  gRNA
agtacgtggcccaagagttg

SEQ ID NO: 138075 - DNA, 20 bp, Artificial Sequence
  mmSKRIPTE0008854_Fga_7
  gRNA
aatggttaacttaatctagg

SEQ ID NO: 138076 - DNA, 20 bp, Artificial Sequence
  mmSKRIPTE0008855_Fga_8
  gRNA
gactgggtaaggcgagcaca

SEQ ID NO: 138077 - DNA, 20 bp, Artificial Sequence
  mmSKRIPTE0008856_Fga_9
  gRNA
tttagagcatgaacgatgtg

SEQ ID NO: 138078 - DNA, 20 bp, Artificial Sequence
  mmSKRIPTE0008857_Cxcl9_1
  gRNA
agtaaggcatataggtacgt

SEQ ID NO: 138079 - DNA, 20 bp, Artificial Sequence
  mmSKRIPTE0008858_Cxcl9_2
  gRNA
aacctgcctagatccggact

SEQ ID NO: 138080 - DNA, 20 bp, Artificial Sequence
  mmSKRIPTE0008859_Cxcl9_3
  gRNA
ggtctcgaaagctacgtggg

SEQ ID NO: 138081 - DNA, 20 bp, Artificial Sequence
  mmSKRIPTE0008860_Cxcl9_4
  gRNA
accacaaattgatcgtcctg

SEQ ID NO: 138082 - DNA, 20 bp, Artificial Sequence
  mmSKRIPTE0008861_Cxcl9_5
  gRNA
gatctgatgttatcacgact

SEQ ID NO: 138083 - DNA, 20 bp, Artificial Sequence
  mmSKRIPTE0008862_Cxcl9_6
  gRNA
ccacgtgtgcgtgagccttg

SEQ ID NO: 138084 - DNA, 20 bp, Artificial Sequence
  mmSKRIPTE0008863_Cxcl9_7
  gRNA
tcaccactcctagcctgatg

SEQ ID NO: 138085 - DNA, 20 bp, Artificial Sequence
  mmSKRIPTE0008864_Cxcl9_8
  gRNA
ggagttggaccatctcgaag

SEQ ID NO: 138086 - DNA, 20 bp, Artificial Sequence
  mmSKRIPTE0008865_Cxcl9_9
  gRNA
ccagccaatcagagacggga

SEQ ID NO: 138087 - DNA, 20 bp, Artificial Sequence
  mmSKRIPTE0008866_Hsph1_1
  gRNA
gtctagcccaaccaccgaca

SEQ ID NO: 138088 - DNA, 20 bp, Artificial Sequence
  mmSKRIPTE0008867_Hsph1_2
  gRNA
ctagagcctaagccatgccg

SEQ ID NO: 138089 - DNA, 20 bp, Artificial Sequence
  mmSKRIPTE0008868_Hsph1_3
  gRNA
ccgtagtgacacgctagccg

SEQ ID NO: 138090 - DNA, 20 bp, Artificial Sequence
  mmSKRIPTE0008869_Hsph1_4
  gRNA
gaccagtgctgtcaggacgt

SEQ ID NO: 138091 - DNA, 20 bp, Artificial Sequence
  mmSKRIPTE0008870_Hsph1_5
  gRNA
gcaagatctcccgaatgccg

SEQ ID NO: 138092 - DNA, 20 bp, Artificial Sequence
  mmSKRIPTE0008871_Hsph1_6
  gRNA
tgcacagtaatcctgatgtg

SEQ ID NO: 138093 - DNA, 20 bp, Artificial Sequence
  mmSKRIPTE0008872_Hsph1_7
  gRNA
gaggcatcttcccgactggt

SEQ ID NO: 138094 - DNA, 20 bp, Artificial Sequence
  mmSKRIPTE0008873_Hsph1_8
  gRNA
aggaccgtagttaatgtgaa

SEQ ID NO: 138095 - DNA, 20 bp, Artificial Sequence
  mmSKRIPTE0008874_Hsph1_9
  gRNA
gcactcgtcctaactggagt

SEQ ID NO: 138096 - DNA, 20 bp, Artificial Sequence
  mmSKRIPTE0008875_Fzd5_1
  gRNA
tcacactcaagactccggag

SEQ ID NO: 138097 - DNA, 20 bp, Artificial Sequence
  mmSKRIPTE0008876_Fzd5_2
  gRNA
gcttgtggtatgcggcggtg

SEQ ID NO: 138098 - DNA, 20 bp, Artificial Sequence
  mmSKRIPTE0008877_Fzd5_3
  gRNA
gcagcacttgaactgcgcgg

SEQ ID NO: 138099 - DNA, 20 bp, Artificial Sequence
  mmSKRIPTE0008878_Fzd5_4
  gRNA
cgggtgaactgggaagacgc

SEQ ID NO: 138100 - DNA, 20 bp, Artificial Sequence
  mmSKRIPTE0008879_Fzd5_5
  gRNA
tctcggcggggccacaagag

SEQ ID NO: 138101 - DNA, 20 bp, Artificial Sequence
  mmSKRIPTE0008880_Fzd5_6
  gRNA
gattcggagtcgcgcgactg

SEQ ID NO: 138102 - DNA, 20 bp, Artificial Sequence
  mmSKRIPTE0008881_Fzd5_7
  gRNA
ggacccggagagcgattcgt

SEQ ID NO: 138103 - DNA, 20 bp, Artificial Sequence
  mmSKRIPTE0008882_Fzd5_8
  gRNA
gctctgcccgaatcatgcag

SEQ ID NO: 138104 - DNA, 20 bp, Artificial Sequence
  mmSKRIPTE0008883_Fzd5_9
  gRNA
ggaatcgttccatgtcaatg

SEQ ID NO: 138105 - DNA, 20 bp, Artificial Sequence
  mmSKRIPTE0008884_Il20_1
  gRNA
agaatctcactagatgacga

SEQ ID NO: 138106 - DNA, 20 bp, Artificial Sequence
  mmSKRIPTE0008885_Il20_2
  gRNA
aatagttcactatggcccta

SEQ ID NO: 138107 - DNA, 20 bp, Artificial Sequence
  mmSKRIPTE0008886_Il20_3
  gRNA
accacattcacgtagtgcca

SEQ ID NO: 138108 - DNA, 20 bp, Artificial Sequence
  mmSKRIPTE0008887_Il20_4
  gRNA
ctgagactggaattaacgaa

SEQ ID NO: 138109 - DNA, 20 bp, Artificial Sequence
  mmSKRIPTE0008888_Il20_5
  gRNA
aaggtctggatttgatccgg

SEQ ID NO: 138110 - DNA, 20 bp, Artificial Sequence
  mmSKRIPTE0008889_Il20_6
  gRNA
ctgttcagttcccacccagt

SEQ ID NO: 138111 - DNA, 20 bp, Artificial Sequence
  mmSKRIPTE0008890_Il20_7
  gRNA
aaatgcctctcactagaccc

SEQ ID NO: 138112 - DNA, 20 bp, Artificial Sequence
  mmSKRIPTE0008891_Il20_8
  gRNA
atgttcgtatggattgtggg

SEQ ID NO: 138113 - DNA, 20 bp, Artificial Sequence
  mmSKRIPTE0008892_Il20_9
  gRNA
gtgttggttacatagttgga

SEQ ID NO: 138114 - DNA, 20 bp, Artificial Sequence
  mmSKRIPTE0008893_Nfe2l1_1
  gRNA
atccgggatatccggcgccg

SEQ ID NO: 138115 - DNA, 20 bp, Artificial Sequence
  mmSKRIPTE0008894_Nfe2l1_2
  gRNA
ttgttacctaggctgccgca

SEQ ID NO: 138116 - DNA, 20 bp, Artificial Sequence
  mmSKRIPTE0008895_Nfe2l1_3
  gRNA
agggcacgtaactacaagct

SEQ ID NO: 138117 - DNA, 20 bp, Artificial Sequence
  mmSKRIPTE0008896_Nfe2l1_4
  gRNA
taggccctataagtgtaaca

SEQ ID NO: 138118 - DNA, 20 bp, Artificial Sequence
  mmSKRIPTE0008897_Nfe2l1_5
  gRNA
ccatagttaggaaccccttg

SEQ ID NO: 138119 - DNA, 20 bp, Artificial Sequence
  mmSKRIPTE0008898_Nfe2l1_6
  gRNA
cctcctcattcctcgcacga

SEQ ID NO: 138120 - DNA, 20 bp, Artificial Sequence
  mmSKRIPTE0008899_Nfe2l1_7
  gRNA
gtcagaaaagtgcacctgca

SEQ ID NO: 138121 - DNA, 20 bp, Artificial Sequence
  mmSKRIPTE0008900_Nfe2l1_8
  gRNA
ggcccctcggagctaccaag

SEQ ID NO: 138122 - DNA, 20 bp, Artificial Sequence
  mmSKRIPTE0008901_Nfe2l1_9
  gRNA
tatggaacacagacatggcg

SEQ ID NO: 138123 - DNA, 20 bp, Artificial Sequence
  mmSKRIPTE0008902_H2-M10.1_1
  gRNA
atgcaggtgaagcaaaacgg

SEQ ID NO: 138124 - DNA, 20 bp, Artificial Sequence
  mmSKRIPTE0008903_H2-M10.1_2
  gRNA
tagttggggacaaaatcccg

SEQ ID NO: 138125 - DNA, 20 bp, Artificial Sequence
  mmSKRIPTE0008904_H2-M10.1_3
  gRNA
tcaacacgcgaagagcaggt

SEQ ID NO: 138126 - DNA, 20 bp, Artificial Sequence
  mmSKRIPTE0008905_H2-M10.1_4
  gRNA
gcttctagtaggtttcccaa

SEQ ID NO: 138127 - DNA, 20 bp, Artificial Sequence
  mmSKRIPTE0008906_H2-M10.1_5
  gRNA
ggaatggtctcgttagacaa

SEQ ID NO: 138128 - DNA, 20 bp, Artificial Sequence
  mmSKRIPTE0008907_H2-M10.1_6
  gRNA
tgagtcggtagtgaccgccg

SEQ ID NO: 138129 - DNA, 20 bp, Artificial Sequence
  mmSKRIPTE0008908_H2-M10.1_7
  gRNA
gagaaccatagattgtgacc

SEQ ID NO: 138130 - DNA, 20 bp, Artificial Sequence
  mmSKRIPTE0008909_H2-M10.1_8
  gRNA
cttcactttacaacccgatg

SEQ ID NO: 138131 - DNA, 20 bp, Artificial Sequence
  mmSKRIPTE0008910_H2-M10.1_9
  gRNA
accccaataagctcgactct

SEQ ID NO: 138132 - DNA, 20 bp, Artificial Sequence
  mmSKRIPTE0008911_Tnfsf15_1
  gRNA
acaaagcaaatacagaccgg

SEQ ID NO: 138133 - DNA, 20 bp, Artificial Sequence
  mmSKRIPTE0008912_Tnfsf15_2
  gRNA
aacatcaatcctatgcattg

SEQ ID NO: 138134 - DNA, 20 bp, Artificial Sequence
  mmSKRIPTE0008913_Tnfsf15_3
  gRNA
gagccattcatggatagcgc

SEQ ID NO: 138135 - DNA, 20 bp, Artificial Sequence
  mmSKRIPTE0008914_Tnfsf15_4
  gRNA
gtgtcatggtagatgccaca

SEQ ID NO: 138136 - DNA, 20 bp, Artificial Sequence
  mmSKRIPTE0008915_Tnfsf15_5
  gRNA
tctccatcgttgtccagtat

SEQ ID NO: 138137 - DNA, 20 bp, Artificial Sequence
  mmSKRIPTE0008916_Tnfsf15_6
  gRNA
tctgagcctaggtcctcgct

SEQ ID NO: 138138 - DNA, 20 bp, Artificial Sequence
  mmSKRIPTE0008917_Tnfsf15_7
  gRNA
agcctgcccgcctactaaca

SEQ ID NO: 138139 - DNA, 20 bp, Artificial Sequence
  mmSKRIPTE0008918_Tnfsf15_8
  gRNA
actcccagatcacattccga

SEQ ID NO: 138140 - DNA, 20 bp, Artificial Sequence
  mmSKRIPTE0008919_Tnfsf15_9
  gRNA
ggagggtgctaagtcctgcg

SEQ ID NO: 138141 - DNA, 20 bp, Artificial Sequence
  mmSKRIPTE0008920_Irf5_1
  gRNA
cgtagactgatatagcaatg

SEQ ID NO: 138142 - DNA, 20 bp, Artificial Sequence
  mmSKRIPTE0008921_Irf5_2
  gRNA
tctcccctaacagaactcac

SEQ ID NO: 138143 - DNA, 20 bp, Artificial Sequence
  mmSKRIPTE0008922_Irf5_3
  gRNA
taccctggcgccatgccacg

SEQ ID NO: 138144 - DNA, 20 bp, Artificial Sequence
  mmSKRIPTE0008923_Irf5_4
  gRNA
acagctactcagcagccggg

SEQ ID NO: 138145 - DNA, 20 bp, Artificial Sequence
  mmSKRIPTE0008924_Irf5_5
  gRNA
cagggccacattatacctgt

SEQ ID NO: 138146 - DNA, 20 bp, Artificial Sequence
  mmSKRIPTE0008925_Irf5_6
  gRNA
agtgcgcttccctagcccag

SEQ ID NO: 138147 - DNA, 20 bp, Artificial Sequence
  mmSKRIPTE0008926_Irf5_7
  gRNA
agggcttcagcctcacacgg

SEQ ID NO: 138148 - DNA, 20 bp, Artificial Sequence
  mmSKRIPTE0008927_Irf5_8
  gRNA
tcagccgtacaagatctacg

SEQ ID NO: 138149 - DNA, 20 bp, Artificial Sequence
  mmSKRIPTE0008928_Irf5_9
  gRNA
tggttctgaaaggaacggag

SEQ ID NO: 138150 - DNA, 20 bp, Artificial Sequence
  mmSKRIPTE0008929_Aplf_1
  gRNA
cttaggaaacttaagcctcg

SEQ ID NO: 138151 - DNA, 20 bp, Artificial Sequence
  mmSKRIPTE0008930_Aplf_2
  gRNA
ggcacccagagttaggagcg

SEQ ID NO: 138152 - DNA, 20 bp, Artificial Sequence
  mmSKRIPTE0008931_Aplf_3
  gRNA
atgcagtctgtactccggaa

SEQ ID NO: 138153 - DNA, 20 bp, Artificial Sequence
  mmSKRIPTE0008932_Aplf_4
  gRNA
actcagccgggtcatccaag

SEQ ID NO: 138154 - DNA, 20 bp, Artificial Sequence
  mmSKRIPTE0008933_Aplf_5
  gRNA
tagataaggatgtcatccag

SEQ ID NO: 138155 - DNA, 20 bp, Artificial Sequence
  mmSKRIPTE0008934_Aplf_6
  gRNA
atactcgcctgatgtcatca

SEQ ID NO: 138156 - DNA, 20 bp, Artificial Sequence
  mmSKRIPTE0008935_Aplf_7
  gRNA
gcccaagcacgaatcaacct

SEQ ID NO: 138157 - DNA, 20 bp, Artificial Sequence
  mmSKRIPTE0008936_Aplf_8
  gRNA
tgtcagcggaacaagaccct

SEQ ID NO: 138158 - DNA, 20 bp, Artificial Sequence
  mmSKRIPTE0008937_Aplf_9
  gRNA
gacctattagagctatacaa

SEQ ID NO: 138159 - DNA, 20 bp, Artificial Sequence
  mmSKRIPTE0008938_H2-Q10_1
  gRNA
ggactttataaccagtggcg

SEQ ID NO: 138160 - DNA, 20 bp, Artificial Sequence
  mmSKRIPTE0008939_H2-Q10_2
  gRNA
tggaggggtcgtgacctccg

SEQ ID NO: 138161 - DNA, 20 bp, Artificial Sequence
  mmSKRIPTE0008940_H2-Q10_3
  gRNA
taaccgacaataatgaaccg

SEQ ID NO: 138162 - DNA, 20 bp, Artificial Sequence
  mmSKRIPTE0008941_H2-Q10_4
  gRNA
ctgggccaggtcattcggct

SEQ ID NO: 138163 - DNA, 20 bp, Artificial Sequence
  mmSKRIPTE0008942_H2-Q10_5
  gRNA
gattatcacccgacgcaagt

SEQ ID NO: 138164 - DNA, 20 bp, Artificial Sequence
  mmSKRIPTE0008943_H2-Q10_6
  gRNA
caggaacgcgccactcatgg

SEQ ID NO: 138165 - DNA, 20 bp, Artificial Sequence
  mmSKRIPTE0008944_H2-Q10_7
  gRNA
ggaggtttcgaaatacctca

SEQ ID NO: 138166 - DNA, 20 bp, Artificial Sequence
  mmSKRIPTE0008945_H2-Q10_8
  gRNA
atgcgtattgcaggtacccg

SEQ ID NO: 138167 - DNA, 20 bp, Artificial Sequence
  mmSKRIPTE0008946_H2-Q10_9
  gRNA
cacacattgctgatctgctg

SEQ ID NO: 138168 - DNA, 20 bp, Artificial Sequence
  mmSKRIPTE0008947_H2-M10.3_1
  gRNA
actacctaagtattggaacg

SEQ ID NO: 138169 - DNA, 20 bp, Artificial Sequence
  mmSKRIPTE0008948_H2-M10.3_2
  gRNA
tttgtacacactcccctcga

SEQ ID NO: 138170 - DNA, 20 bp, Artificial Sequence
  mmSKRIPTE0008949_H2-M10.3_3
  gRNA
cgttggggacaaaatcctgg

SEQ ID NO: 138171 - DNA, 20 bp, Artificial Sequence
  mmSKRIPTE0008950_H2-M10.3_4
  gRNA
agaatcagggttgttaggta

SEQ ID NO: 138172 - DNA, 20 bp, Artificial Sequence
  mmSKRIPTE0008951_H2-M10.3_5
  gRNA
tgagccggaagtgaccgtga

SEQ ID NO: 138173 - DNA, 20 bp, Artificial Sequence
  mmSKRIPTE0008952_H2-M10.3_6
  gRNA
agcactgttcaggcccacag

SEQ ID NO: 138174 - DNA, 20 bp, Artificial Sequence
  mmSKRIPTE0008953_H2-M10.3_7
  gRNA
ttgtcatgacctcggagctg

SEQ ID NO: 138175 - DNA, 20 bp, Artificial Sequence
  mmSKRIPTE0008954_H2-M10.3_8
  gRNA
tgcatctctcctagtaaggt

SEQ ID NO: 138176 - DNA, 20 bp, Artificial Sequence
  mmSKRIPTE0008955_H2-M10.3_9
  gRNA
atggacctgagttgcagcag

SEQ ID NO: 138177 - DNA, 20 bp, Artificial Sequence
  mmSKRIPTE0008956_S100a14_1
  gRNA
cagtccccacccctatcatg

SEQ ID NO: 138178 - DNA, 20 bp, Artificial Sequence
  mmSKRIPTE0008957_S100a14_2
  gRNA
tgaaggtgaaggcatatgtt

SEQ ID NO: 138179 - DNA, 20 bp, Artificial Sequence
  mmSKRIPTE0008958_S100a14_3
  gRNA
gtgtcggtcagccaatgctg

SEQ ID NO: 138180 - DNA, 20 bp, Artificial Sequence
  mmSKRIPTE0008959_S100a14_4
  gRNA
atcaccctgtgtaggcacaa

SEQ ID NO: 138181 - DNA, 20 bp, Artificial Sequence
  mmSKRIPTE0008960_S100a14_5
  gRNA
aggcctgttactcggagctg

SEQ ID NO: 138182 - DNA, 20 bp, Artificial Sequence
  mmSKRIPTE0008961_S100a14_6
  gRNA
cctaccaggtgtccacaaag

SEQ ID NO: 138183 - DNA, 20 bp, Artificial Sequence
  mmSKRIPTE0008962_S100a14_7
  gRNA
cacacctcatgccggtactg

SEQ ID NO: 138184 - DNA, 20 bp, Artificial Sequence
  mmSKRIPTE0008963_S100a14_8
  gRNA
caggaacgatgggacagtgt

SEQ ID NO: 138185 - DNA, 20 bp, Artificial Sequence
  mmSKRIPTE0008964_S100a14_9
  gRNA
aaggagatacaacccacatg

SEQ ID NO: 138186 - DNA, 20 bp, Artificial Sequence
  mmSKRIPTE0008965_Runx1_1
  gRNA
tggtggctttgtgacgaccg

SEQ ID NO: 138187 - DNA, 20 bp, Artificial Sequence
  mmSKRIPTE0008966_Runx1_2
  gRNA
ttgacctacagaacaccggt

SEQ ID NO: 138188 - DNA, 20 bp, Artificial Sequence
  mmSKRIPTE0008967_Runx1_3
  gRNA
tagtcgtgtccatcgctcag

SEQ ID NO: 138189 - DNA, 20 bp, Artificial Sequence
  mmSKRIPTE0008968_Runx1_4
  gRNA
tgagatctagttacacggat

SEQ ID NO: 138190 - DNA, 20 bp, Artificial Sequence
  mmSKRIPTE0008969_Runx1_5
  gRNA
catacgatcagttctcagag

SEQ ID NO: 138191 - DNA, 20 bp, Artificial Sequence
  mmSKRIPTE0008970_Runx1_6
  gRNA
accacctagacgtcaaccaa

SEQ ID NO: 138192 - DNA, 20 bp, Artificial Sequence
  mmSKRIPTE0008971_Runx1_7
  gRNA
aaaccctgtcgcatgttcga

SEQ ID NO: 138193 - DNA, 20 bp, Artificial Sequence
  mmSKRIPTE0008972_Runx1_8
  gRNA
gctgagcgccatcgccatcg

SEQ ID NO: 138194 - DNA, 20 bp, Artificial Sequence
  mmSKRIPTE0008973_Runx1_9
  gRNA
gtgaaaacacacctgcagcg

SEQ ID NO: 138195 - DNA, 20 bp, Artificial Sequence
  mmSKRIPTE0008974_Ddt_1
  gRNA
ctaaacgtctgcgacttcag

SEQ ID NO: 138196 - DNA, 20 bp, Artificial Sequence
  mmSKRIPTE0008975_Ddt_2
  gRNA
ccagtgcagacttaacgcaa

SEQ ID NO: 138197 - DNA, 20 bp, Artificial Sequence
  mmSKRIPTE0008976_Ddt_3
  gRNA
gtgagcgttacgatacgacc

SEQ ID NO: 138198 - DNA, 20 bp, Artificial Sequence
  mmSKRIPTE0008977_Ddt_4
  gRNA
aaacccgaagacgtgagtga

SEQ ID NO: 138199 - DNA, 20 bp, Artificial Sequence
  mmSKRIPTE0008978_Ddt_5
  gRNA
gatttaccatcctatctacc

SEQ ID NO: 138200 - DNA, 20 bp, Artificial Sequence
  mmSKRIPTE0008979_Ddt_6
  gRNA
gcggataacgatcctttagg

SEQ ID NO: 138201 - DNA, 20 bp, Artificial Sequence
  mmSKRIPTE0008980_Ddt_7
  gRNA
gcgccaaattcttaacgtgg

SEQ ID NO: 138202 - DNA, 20 bp, Artificial Sequence
  mmSKRIPTE0008981_Ddt_8
  gRNA
gtgacggaaacaaagaaccc

SEQ ID NO: 138203 - DNA, 20 bp, Artificial Sequence
  mmSKRIPTE0008982_Ddt_9
  gRNA
cctgacgtgactgactccca

SEQ ID NO: 138204 - DNA, 20 bp, Artificial Sequence
  mmSKRIPTE0008983_Apod_1
  gRNA
tggaattctcctcagcaccg

SEQ ID NO: 138205 - DNA, 20 bp, Artificial Sequence
  mmSKRIPTE0008984_Apod_2
  gRNA
cttcagtcatctgatctgag

SEQ ID NO: 138206 - DNA, 20 bp, Artificial Sequence
  mmSKRIPTE0008985_Apod_3
  gRNA
tctaaatcgatgctgaaacg

SEQ ID NO: 138207 - DNA, 20 bp, Artificial Sequence
  mmSKRIPTE0008986_Apod_4
  gRNA
agcaaatctcttcccactcg

SEQ ID NO: 138208 - DNA, 20 bp, Artificial Sequence
  mmSKRIPTE0008987_Apod_5
  gRNA
ttgcacttggggtaaccgat

SEQ ID NO: 138209 - DNA, 20 bp, Artificial Sequence
  mmSKRIPTE0008988_Apod_6
  gRNA
tgtcacgttctattcctaag

SEQ ID NO: 138210 - DNA, 20 bp, Artificial Sequence
  mmSKRIPTE0008989_Apod_7
  gRNA
gaaggaactggatacctaca

SEQ ID NO: 138211 - DNA, 20 bp, Artificial Sequence
  mmSKRIPTE0008990_Apod_8
  gRNA
aacctcatgaggaacgacca

SEQ ID NO: 138212 - DNA, 20 bp, Artificial Sequence
  mmSKRIPTE0008991_Apod_9
  gRNA
tatagtgcaagagtcatggt

SEQ ID NO: 138213 - DNA, 20 bp, Artificial Sequence
  mmSKRIPTE0008992_H2-T24_1
  gRNA
aaggagaacccaaggaatcg

SEQ ID NO: 138214 - DNA, 20 bp, Artificial Sequence
  mmSKRIPTE0008993_H2-T24_2
  gRNA
tagagactattacaccaccg

SEQ ID NO: 138215 - DNA, 20 bp, Artificial Sequence
  mmSKRIPTE0008994_H2-T24_3
  gRNA
acccgctacaaaactcaggt

SEQ ID NO: 138216 - DNA, 20 bp, Artificial Sequence
  mmSKRIPTE0008995_H2-T24_4
  gRNA
cctagcatatactcctgtcg

SEQ ID NO: 138217 - DNA, 20 bp, Artificial Sequence
  mmSKRIPTE0008996_H2-T24_5
  gRNA
ctaaagaaaacgtcaccctg

SEQ ID NO: 138218 - DNA, 20 bp, Artificial Sequence
  mmSKRIPTE0008997_H2-T24_6
  gRNA
ttagtgtgaggtaccgagtg

SEQ ID NO: 138219 - DNA, 20 bp, Artificial Sequence
  mmSKRIPTE0008998_H2-T24_7
  gRNA
ctacgacagcaggagcatga

SEQ ID NO: 138220 - DNA, 20 bp, Artificial Sequence
  mmSKRIPTE0008999_H2-T24_8
  gRNA
agcctgttaacagataaggc

SEQ ID NO: 138221 - DNA, 20 bp, Artificial Sequence
  mmSKRIPTE0009000_H2-T24_9
  gRNA
gttcacactctagataacct

SEQ ID NO: 138222 - DNA, 20 bp, Artificial Sequence
  mmSKRIPTE0009001_Il1f10_1
  gRNA
ccgaggcctagaccgctcca

SEQ ID NO: 138223 - DNA, 20 bp, Artificial Sequence
  mmSKRIPTE0009002_Il1f10_2
  gRNA
ttaacgatcgctcaatcaag

SEQ ID NO: 138224 - DNA, 20 bp, Artificial Sequence
  mmSKRIPTE0009003_Il1f10_3
  gRNA
aacatcgaggacctatacaa

SEQ ID NO: 138225 - DNA, 20 bp, Artificial Sequence
  mmSKRIPTE0009004_Il1f10_4
  gRNA
tagtccaggtgatcttccgg

SEQ ID NO: 138226 - DNA, 20 bp, Artificial Sequence
  mmSKRIPTE0009005_Il1f10_5
  gRNA
taggggtacggaacagcttg

SEQ ID NO: 138227 - DNA, 20 bp, Artificial Sequence
  mmSKRIPTE0009006_Il1f10_6
  gRNA
gaaatggacaatgatccctg

SEQ ID NO: 138228 - DNA, 20 bp, Artificial Sequence
  mmSKRIPTE0009007_Il1f10_7
  gRNA
cctaggctcaggattatcag

SEQ ID NO: 138229 - DNA, 20 bp, Artificial Sequence
  mmSKRIPTE0009008_Il1f10_8
  gRNA
aaggctttgtacacacggaa

SEQ ID NO: 138230 - DNA, 20 bp, Artificial Sequence
  mmSKRIPTE0009009_Il1f10_9
  gRNA
gaatggaacaactgtaagag

SEQ ID NO: 138231 - DNA, 20 bp, Artificial Sequence
  mmSKRIPTE0009010_Il1a_1
  gRNA
gatagtatcatatgtcgggg

SEQ ID NO: 138232 - DNA, 20 bp, Artificial Sequence
  mmSKRIPTE0009011_Il1a_2
  gRNA
tctgcctgataccggccaga

SEQ ID NO: 138233 - DNA, 20 bp, Artificial Sequence
  mmSKRIPTE0009012_Il1a_3
  gRNA
acctagaaaaccctgctgcg

SEQ ID NO: 138234 - DNA, 20 bp, Artificial Sequence
  mmSKRIPTE0009013_Il1a_4
  gRNA
ccaatagtacaaccccaggt

SEQ ID NO: 138235 - DNA, 20 bp, Artificial Sequence
  mmSKRIPTE0009014_Il1a_5
  gRNA
tggagggtagctaatccaag

SEQ ID NO: 138236 - DNA, 20 bp, Artificial Sequence
  mmSKRIPTE0009015_Il1a_6
  gRNA
aaggcggtggcagctagcag

SEQ ID NO: 138237 - DNA, 20 bp, Artificial Sequence
  mmSKRIPTE0009016_Il1a_7
  gRNA
ttctggtaggtgaactagtg

SEQ ID NO: 138238 - DNA, 20 bp, Artificial Sequence
  mmSKRIPTE0009017_Il1a_8
  gRNA
atgtatgcctactcgtcggg

SEQ ID NO: 138239 - DNA, 20 bp, Artificial Sequence
  mmSKRIPTE0009018_Il1a_9
  gRNA
aaaaaccatagccttacaca

SEQ ID NO: 138240 - DNA, 20 bp, Artificial Sequence
  mmSKRIPTE0009019_Vtcn1_1
  gRNA
ctgtatgaattcaagccccg

SEQ ID NO: 138241 - DNA, 20 bp, Artificial Sequence
  mmSKRIPTE0009020_Vtcn1_2
  gRNA
ggagggtgatcatcattcta

SEQ ID NO: 138242 - DNA, 20 bp, Artificial Sequence
  mmSKRIPTE0009021_Vtcn1_3
  gRNA
tacgctgcgaggctcctcgg

SEQ ID NO: 138243 - DNA, 20 bp, Artificial Sequence
  mmSKRIPTE0009022_Vtcn1_4
  gRNA
gccacctccgaatctcggag

SEQ ID NO: 138244 - DNA, 20 bp, Artificial Sequence
  mmSKRIPTE0009023_Vtcn1_5
  gRNA
acatggctgcccaagtacca

SEQ ID NO: 138245 - DNA, 20 bp, Artificial Sequence
  mmSKRIPTE0009024_Vtcn1_6
  gRNA
cgttgctggtccaacaggtg

SEQ ID NO: 138246 - DNA, 20 bp, Artificial Sequence
  mmSKRIPTE0009025_Vtcn1_7
  gRNA
aacccctagaagtctctgca

SEQ ID NO: 138247 - DNA, 20 bp, Artificial Sequence
  mmSKRIPTE0009026_Vtcn1_8
  gRNA
cgagggttagttgcataagt

SEQ ID NO: 138248 - DNA, 20 bp, Artificial Sequence
  mmSKRIPTE0009027_Vtcn1_9
  gRNA
tacgggagatggacgcagtg

SEQ ID NO: 138249 - DNA, 20 bp, Artificial Sequence
  mmSKRIPTE0009028_Nras_1
  gRNA
gacgactagagtcttgcagc

SEQ ID NO: 138250 - DNA, 20 bp, Artificial Sequence
  mmSKRIPTE0009029_Nras_2
  gRNA
accaaattcagcattcctag

SEQ ID NO: 138251 - DNA, 20 bp, Artificial Sequence
  mmSKRIPTE0009030_Nras_3
  gRNA
ggcgcctagtgattacgtag

SEQ ID NO: 138252 - DNA, 20 bp, Artificial Sequence
  mmSKRIPTE0009031_Nras_4
  gRNA
aggcacccattcgatacacg

SEQ ID NO: 138253 - DNA, 20 bp, Artificial Sequence
  mmSKRIPTE0009032_Nras_5
  gRNA
gatgtttgattgatcaagtg

SEQ ID NO: 138254 - DNA, 20 bp, Artificial Sequence
  mmSKRIPTE0009033_Nras_6
  gRNA
gctgagtaatagtagctgga

SEQ ID NO: 138255 - DNA, 20 bp, Artificial Sequence
  mmSKRIPTE0009034_Nras_7
  gRNA
tgtgctcagtaactgagtcg

SEQ ID NO: 138256 - DNA, 20 bp, Artificial Sequence
  mmSKRIPTE0009035_Nras_8
  gRNA
gccatgaacagcccccgcca

SEQ ID NO: 138257 - DNA, 20 bp, Artificial Sequence
  mmSKRIPTE0009036_Nras_9
  gRNA
attaacctctacaggtactg

SEQ ID NO: 138258 - DNA, 20 bp, Artificial Sequence
  mmSKRIPTE0009037_Mapk3_1
  gRNA
aggccctcgcacctagaatg

SEQ ID NO: 138259 - DNA, 20 bp, Artificial Sequence
  mmSKRIPTE0009038_Mapk3_2
  gRNA
gtactacgatccgacagatg

SEQ ID NO: 138260 - DNA, 20 bp, Artificial Sequence
  mmSKRIPTE0009039_Mapk3_3
  gRNA
tcgcccagtagggaaactga

SEQ ID NO: 138261 - DNA, 20 bp, Artificial Sequence
  mmSKRIPTE0009040_Mapk3_4
  gRNA
cctggtctgtcgcagccaag

SEQ ID NO: 138262 - DNA, 20 bp, Artificial Sequence
  mmSKRIPTE0009041_Mapk3_5
  gRNA
cggggtaggctaaaacccag

SEQ ID NO: 138263 - DNA, 20 bp, Artificial Sequence
  mmSKRIPTE0009042_Mapk3_6
  gRNA
cccactggggtagcgacgaa

SEQ ID NO: 138264 - DNA, 20 bp, Artificial Sequence
  mmSKRIPTE0009043_Mapk3_7
  gRNA
tcctactccccccgacgtgg

SEQ ID NO: 138265 - DNA, 20 bp, Artificial Sequence
  mmSKRIPTE0009044_Mapk3_8
  gRNA
ctcaggtattccttccagcg

SEQ ID NO: 138266 - DNA, 20 bp, Artificial Sequence
  mmSKRIPTE0009045_Mapk3_9
  gRNA
gagagtttcccatgtctgcg

SEQ ID NO: 138267 - DNA, 20 bp, Artificial Sequence
  mmSKRIPTE0009046_Cd209e_1
  gRNA
atccgggtactggtaaacca

SEQ ID NO: 138268 - DNA, 20 bp, Artificial Sequence
  mmSKRIPTE0009047_Cd209e_2
  gRNA
gagctacctaaccctagaca

SEQ ID NO: 138269 - DNA, 20 bp, Artificial Sequence
  mmSKRIPTE0009048_Cd209e_3
  gRNA
aaactcctaacgcataattg

SEQ ID NO: 138270 - DNA, 20 bp, Artificial Sequence
  mmSKRIPTE0009049_Cd209e_4
  gRNA
tgaaagtccactccccaact

SEQ ID NO: 138271 - DNA, 20 bp, Artificial Sequence
  mmSKRIPTE0009050_Cd209e_5
  gRNA
ctaagcaggaccaggcacca

SEQ ID NO: 138272 - DNA, 20 bp, Artificial Sequence
  mmSKRIPTE0009051_Cd209e_6
  gRNA
gctttggtcagaacctaggt

SEQ ID NO: 138273 - DNA, 20 bp, Artificial Sequence
  mmSKRIPTE0009052_Cd209e_7
  gRNA
agcactatagtgactaacaa

SEQ ID NO: 138274 - DNA, 20 bp, Artificial Sequence
  mmSKRIPTE0009053_Cd209e_8
  gRNA
agcatggttagtttactacc

SEQ ID NO: 138275 - DNA, 20 bp, Artificial Sequence
  mmSKRIPTE0009054_Cd209e_9
  gRNA
aagagtagctgctaggaacg

SEQ ID NO: 138276 - DNA, 20 bp, Artificial Sequence
  mmSKRIPTE0009055_Sele_1
  gRNA
aagtgcggattccgaaccag

SEQ ID NO: 138277 - DNA, 20 bp, Artificial Sequence
  mmSKRIPTE0009056_Sele_2
  gRNA
aagcatgtacctgaacacgt

SEQ ID NO: 138278 - DNA, 20 bp, Artificial Sequence
  mmSKRIPTE0009057_Sele_3
  gRNA
agaggacgtacaccgcacgg

SEQ ID NO: 138279 - DNA, 20 bp, Artificial Sequence
  mmSKRIPTE0009058_Sele_4
  gRNA
gacatgcacgtttgactgtg

SEQ ID NO: 138280 - DNA, 20 bp, Artificial Sequence
  mmSKRIPTE0009059_Sele_5
  gRNA
attccaatccagtagtaact

SEQ ID NO: 138281 - DNA, 20 bp, Artificial Sequence
  mmSKRIPTE0009060_Sele_6
  gRNA
gagacagtataagcaacact

SEQ ID NO: 138282 - DNA, 20 bp, Artificial Sequence
  mmSKRIPTE0009061_Sele_7
  gRNA
gttatacccattgaacccta

SEQ ID NO: 138283 - DNA, 20 bp, Artificial Sequence
  mmSKRIPTE0009062_Sele_8
  gRNA
agcttcacattcaaccactg

SEQ ID NO: 138284 - DNA, 20 bp, Artificial Sequence
  mmSKRIPTE0009063_Sele_9
  gRNA
ggaacatttcctgataccgt

SEQ ID NO: 138285 - DNA, 20 bp, Artificial Sequence
  mmSKRIPTE0009064_Frk_1
  gRNA
accaggtacgagaatgtcga

SEQ ID NO: 138286 - DNA, 20 bp, Artificial Sequence
  mmSKRIPTE0009065_Frk_2
  gRNA
ttaccaagcacgtactgcag

SEQ ID NO: 138287 - DNA, 20 bp, Artificial Sequence
  mmSKRIPTE0009066_Frk_3
  gRNA
tcctccgccacgtaattgga

SEQ ID NO: 138288 - DNA, 20 bp, Artificial Sequence
  mmSKRIPTE0009067_Frk_4
  gRNA
gtcttggacacttcgcatga

SEQ ID NO: 138289 - DNA, 20 bp, Artificial Sequence
  mmSKRIPTE0009068_Frk_5
  gRNA
gatcggtccagtgtatggaa

SEQ ID NO: 138290 - DNA, 20 bp, Artificial Sequence
  mmSKRIPTE0009069_Frk_6
  gRNA
aattcatatgccaatcacac

SEQ ID NO: 138291 - DNA, 20 bp, Artificial Sequence
  mmSKRIPTE0009070_Frk_7
  gRNA
gaggagagatccgaagcggg

SEQ ID NO: 138292 - DNA, 20 bp, Artificial Sequence
  mmSKRIPTE0009071_Frk_8
  gRNA
acacagcccgtcacttgttg

SEQ ID NO: 138293 - DNA, 20 bp, Artificial Sequence
  mmSKRIPTE0009072_Frk_9
  gRNA
ttaagtcatcagactcacat

SEQ ID NO: 138294 - DNA, 20 bp, Artificial Sequence
  mmSKRIPTE0009073_Adora2a_1
  gRNA
tatctcccgctaataaagct

SEQ ID NO: 138295 - DNA, 20 bp, Artificial Sequence
  mmSKRIPTE0009074_Adora2a_2
  gRNA
tagggccccgagttaggtca

SEQ ID NO: 138296 - DNA, 20 bp, Artificial Sequence
  mmSKRIPTE0009075_Adora2a_3
  gRNA
ctgctactgaggctagaggg

SEQ ID NO: 138297 - DNA, 20 bp, Artificial Sequence
  mmSKRIPTE0009076_Adora2a_4
  gRNA
attagagacccgatgaacca

SEQ ID NO: 138298 - DNA, 20 bp, Artificial Sequence
  mmSKRIPTE0009077_Adora2a_5
  gRNA
aaccactcggcccaacacat

SEQ ID NO: 138299 - DNA, 20 bp, Artificial Sequence
  mmSKRIPTE0009078_Adora2a_6
  gRNA
gtgctccccactctggacgg

SEQ ID NO: 138300 - DNA, 20 bp, Artificial Sequence
  mmSKRIPTE0009079_Adora2a_7
  gRNA
gctctccctgggaacgctcg

SEQ ID NO: 138301 - DNA, 20 bp, Artificial Sequence
  mmSKRIPTE0009080_Adora2a_8
  gRNA
ctgcagattgacagtcccgg

SEQ ID NO: 138302 - DNA, 20 bp, Artificial Sequence
  mmSKRIPTE0009081_Adora2a_9
  gRNA
tgagacgtgagcccacactc

SEQ ID NO: 138303 - DNA, 20 bp, Artificial Sequence
  mmSKRIPTE0009082_Ighv1-78_1
  gRNA
gatgtgcagaaagatacgct

SEQ ID NO: 138304 - DNA, 20 bp, Artificial Sequence
  mmSKRIPTE0009083_Ighv1-78_2
  gRNA
gcaacagtctgacgctgagt

SEQ ID NO: 138305 - DNA, 20 bp, Artificial Sequence
  mmSKRIPTE0009084_Ighv1-78_3
  gRNA
gtgaatagtatggtcagtga

SEQ ID NO: 138306 - DNA, 20 bp, Artificial Sequence
  mmSKRIPTE0009085_Ighv1-78_4
  gRNA
ggtgacaaagatatccactc

SEQ ID NO: 138307 - DNA, 20 bp, Artificial Sequence
  mmSKRIPTE0009086_Ighv1-78_5
  gRNA
cactgactgtaacaatggaa

SEQ ID NO: 138308 - DNA, 20 bp, Artificial Sequence
  mmSKRIPTE0009087_Ighv1-78_6
  gRNA
ccaaatctaaagtggagtca

SEQ ID NO: 138309 - DNA, 20 bp, Artificial Sequence
  mmSKRIPTE0009088_Ighv1-78_7
  gRNA
ggatatatttatcctagaga

SEQ ID NO: 138310 - DNA, 20 bp, Artificial Sequence
  mmSKRIPTE0009089_Naip6_1
  gRNA
accaaagcatcaacacccgc

SEQ ID NO: 138311 - DNA, 20 bp, Artificial Sequence
  mmSKRIPTE0009090_Naip6_2
  gRNA
cagtatattcaagactacga

SEQ ID NO: 138312 - DNA, 20 bp, Artificial Sequence
  mmSKRIPTE0009091_Naip6_3
  gRNA
tcaaaggtgctcagaatcgg

SEQ ID NO: 138313 - DNA, 20 bp, Artificial Sequence
  mmSKRIPTE0009092_Naip6_4
  gRNA
tctgctaacaggccaagcac

SEQ ID NO: 138314 - DNA, 20 bp, Artificial Sequence
  mmSKRIPTE0009093_Naip6_5
  gRNA
gaggacagcgatttagtaca

SEQ ID NO: 138315 - DNA, 20 bp, Artificial Sequence
  mmSKRIPTE0009094_Naip6_6
  gRNA
agtacatctcctatgacaca

SEQ ID NO: 138316 - DNA, 20 bp, Artificial Sequence
  mmSKRIPTE0009095_Naip6_7
  gRNA
ggagaggtcagactctgtag

SEQ ID NO: 138317 - DNA, 20 bp, Artificial Sequence
  mmSKRIPTE0009096_Naip6_8
  gRNA
caggtaagacgtgggcagtg

SEQ ID NO: 138318 - DNA, 20 bp, Artificial Sequence
  mmSKRIPTE0009097_Naip6_9
  gRNA
ataatgatgtgggagagtca

SEQ ID NO: 138319 - DNA, 20 bp, Artificial Sequence
  mmSKRIPTE0009098_Cdkn1a_1
  gRNA
catctcagggccgaaaacgg

SEQ ID NO: 138320 - DNA, 20 bp, Artificial Sequence
  mmSKRIPTE0009099_Cdkn1a_2
  gRNA
gtggaactttgacttcgtca

SEQ ID NO: 138321 - DNA, 20 bp, Artificial Sequence
  mmSKRIPTE0009100_Cdkn1a_3
  gRNA
ggacatcacccgtgaccttg

SEQ ID NO: 138322 - DNA, 20 bp, Artificial Sequence
  mmSKRIPTE0009101_Cdkn1a_4
  gRNA
cctaaattagtaggacggta

SEQ ID NO: 138323 - DNA, 20 bp, Artificial Sequence
  mmSKRIPTE0009102_Cdkn1a_5
  gRNA
atgtccgacctgttccgcac

SEQ ID NO: 138324 - DNA, 20 bp, Artificial Sequence
  mmSKRIPTE0009103_Cdkn1a_6
  gRNA
ccacgggaccgaagagacaa

SEQ ID NO: 138325 - DNA, 20 bp, Artificial Sequence
  mmSKRIPTE0009104_Cdkn1a_7
  gRNA
cataggcgtgggacctcgtg

SEQ ID NO: 138326 - DNA, 20 bp, Artificial Sequence
  mmSKRIPTE0009105_Cdkn1a_8
  gRNA
gggctcagcgcattgctacg

SEQ ID NO: 138327 - DNA, 20 bp, Artificial Sequence
  mmSKRIPTE0009106_Cdkn1a_9
  gRNA
gtggtggaaaagcacctgca

SEQ ID NO: 138328 - DNA, 20 bp, Artificial Sequence
  mmSKRIPTE0009107_Gbp2_1
  gRNA
ccttcgtacgttcctctgag

SEQ ID NO: 138329 - DNA, 20 bp, Artificial Sequence
  mmSKRIPTE0009108_Gbp2_2
  gRNA
taccggagaaagtctaaatg

SEQ ID NO: 138330 - DNA, 20 bp, Artificial Sequence
  mmSKRIPTE0009109_Gbp2_3
  gRNA
aatttcctgatgcacagtcg

SEQ ID NO: 138331 - DNA, 20 bp, Artificial Sequence
  mmSKRIPTE0009110_Gbp2_4
  gRNA
tacaggagaaacgtatggct

SEQ ID NO: 138332 - DNA, 20 bp, Artificial Sequence
  mmSKRIPTE0009111_Gbp2_5
  gRNA
aaatgtcatctctgcccggt

SEQ ID NO: 138333 - DNA, 20 bp, Artificial Sequence
  mmSKRIPTE0009112_Gbp2_6
  gRNA
caagaagttccactggtggt

SEQ ID NO: 138334 - DNA, 20 bp, Artificial Sequence
  mmSKRIPTE0009113_Gbp2_7
  gRNA
ttattaaccatgaagaccag

SEQ ID NO: 138335 - DNA, 20 bp, Artificial Sequence
  mmSKRIPTE0009114_Gbp2_8
  gRNA
tggtttaccctaaccagagg

SEQ ID NO: 138336 - DNA, 20 bp, Artificial Sequence
  mmSKRIPTE0009115_Gbp2_9
  gRNA
tgagagacttgaaaatacga

SEQ ID NO: 138337 - DNA, 20 bp, Artificial Sequence
  mmSKRIPTE0009116_Ceacam1_1
  gRNA
ttattacagagtgttgacgg

SEQ ID NO: 138338 - DNA, 20 bp, Artificial Sequence
  mmSKRIPTE0009117_Ceacam1_2
  gRNA
atagtaatatgaatttcacg

SEQ ID NO: 138339 - DNA, 20 bp, Artificial Sequence
  mmSKRIPTE0009118_Ceacam1_3
  gRNA
taactctacccatgacgccg

SEQ ID NO: 138340 - DNA, 20 bp, Artificial Sequence
  mmSKRIPTE0009119_Ceacam1_4
  gRNA
tgggtccaagtgaggcatcg

SEQ ID NO: 138341 - DNA, 20 bp, Artificial Sequence
  mmSKRIPTE0009120_Ceacam1_5
  gRNA
gtgaactgggtaaacgtgga

SEQ ID NO: 138342 - DNA, 20 bp, Artificial Sequence
  mmSKRIPTE0009121_Ceacam1_6
  gRNA
ttccaggaagtctggcgggt

SEQ ID NO: 138343 - DNA, 20 bp, Artificial Sequence
  mmSKRIPTE0009122_Ceacam1_7
  gRNA
ccacattggtaatagatgca

SEQ ID NO: 138344 - DNA, 20 bp, Artificial Sequence
  mmSKRIPTE0009123_Ceacam1_8
  gRNA
attcgcatccatcgccatgg

SEQ ID NO: 138345 - DNA, 20 bp, Artificial Sequence
  mmSKRIPTE0009124_Ceacam1_9
  gRNA
agcatgccccaatagcaagg

SEQ ID NO: 138346 - DNA, 20 bp, Artificial Sequence
  mmSKRIPTE0009125_Rab33a_1
  gRNA
ggagggtctaagcaaaggcg

SEQ ID NO: 138347 - DNA, 20 bp, Artificial Sequence
  mmSKRIPTE0009126_Rab33a_2
  gRNA
ggcacatcctagcagcggag

SEQ ID NO: 138348 - DNA, 20 bp, Artificial Sequence
  mmSKRIPTE0009127_Rab33a_3
  gRNA
caatattcgagaattaccac

SEQ ID NO: 138349 - DNA, 20 bp, Artificial Sequence
  mmSKRIPTE0009128_Rab33a_4
  gRNA
tcttgtaccgtgatgccgag

SEQ ID NO: 138350 - DNA, 20 bp, Artificial Sequence
  mmSKRIPTE0009129_Rab33a_5
  gRNA
agaacgcttccgtaaaagca

SEQ ID NO: 138351 - DNA, 20 bp, Artificial Sequence
  mmSKRIPTE0009130_Rab33a_6
  gRNA
tcgctttgagcgcactaacg

SEQ ID NO: 138352 - DNA, 20 bp, Artificial Sequence
  mmSKRIPTE0009131_Rab33a_7
  gRNA
ttgtgtggagccctcgagtg

SEQ ID NO: 138353 - DNA, 20 bp, Artificial Sequence
  mmSKRIPTE0009132_Rab33a_8
  gRNA
gcatcgtcggagctggccag

SEQ ID NO: 138354 - DNA, 20 bp, Artificial Sequence
  mmSKRIPTE0009133_Rab33a_9
  gRNA
aatttgtatagattatcacg

SEQ ID NO: 138355 - DNA, 20 bp, Artificial Sequence
  mmSKRIPTE0009134_Cd40lg_1
  gRNA
acttccatggcaccgacgag

SEQ ID NO: 138356 - DNA, 20 bp, Artificial Sequence
  mmSKRIPTE0009135_Cd40lg_2
  gRNA
tgcctaatgattaggccgaa

SEQ ID NO: 138357 - DNA, 20 bp, Artificial Sequence
  mmSKRIPTE0009136_Cd40lg_3
  gRNA
ctatttattatgtaccccca

SEQ ID NO: 138358 - DNA, 20 bp, Artificial Sequence
  mmSKRIPTE0009137_Cd40lg_4
  gRNA
acagtgtacttgacttacca

SEQ ID NO: 138359 - DNA, 20 bp, Artificial Sequence
  mmSKRIPTE0009138_Cd40lg_5
  gRNA
gccttaattagctaaattgg

SEQ ID NO: 138360 - DNA, 20 bp, Artificial Sequence
  mmSKRIPTE0009139_Cd40lg_6
  gRNA
cttggcctactagggccgca

SEQ ID NO: 138361 - DNA, 20 bp, Artificial Sequence
  mmSKRIPTE0009140_Cd40lg_7
  gRNA
ccaaccttcccccagatccg

SEQ ID NO: 138362 - DNA, 20 bp, Artificial Sequence
  mmSKRIPTE0009141_Cd40lg_8
  gRNA
acgcactttatggccctcag

SEQ ID NO: 138363 - DNA, 20 bp, Artificial Sequence
  mmSKRIPTE0009142_Cd40lg_9
  gRNA
cattccaagatcttagtcag

SEQ ID NO: 138364 - DNA, 20 bp, Artificial Sequence
  mmSKRIPTE0009143_Foxj1_1
  gRNA
ggtccccctagtatagacag

SEQ ID NO: 138365 - DNA, 20 bp, Artificial Sequence
  mmSKRIPTE0009144_Foxj1_2
  gRNA
agctctccgccatgtctgcg

SEQ ID NO: 138366 - DNA, 20 bp, Artificial Sequence
  mmSKRIPTE0009145_Foxj1_3
  gRNA
agaaggtctaacctcaagct

SEQ ID NO: 138367 - DNA, 20 bp, Artificial Sequence
  mmSKRIPTE0009146_Foxj1_4
  gRNA
ggtcgcccacagaagtagtg

SEQ ID NO: 138368 - DNA, 20 bp, Artificial Sequence
  mmSKRIPTE0009147_Foxj1_5
  gRNA
aatgagcgtttgttgtacct

SEQ ID NO: 138369 - DNA, 20 bp, Artificial Sequence
  mmSKRIPTE0009148_Foxj1_6
  gRNA
ggagacgcaggatcagacca

SEQ ID NO: 138370 - DNA, 20 bp, Artificial Sequence
  mmSKRIPTE0009149_Foxj1_7
  gRNA
aaggaggcagaaatccggtg

SEQ ID NO: 138371 - DNA, 20 bp, Artificial Sequence
  mmSKRIPTE0009150_Foxj1_8
  gRNA
agaggaaagaggcgccttag

SEQ ID NO: 138372 - DNA, 20 bp, Artificial Sequence
  mmSKRIPTE0009151_Foxj1_9
  gRNA
gcctctgaccgtgaacaggg

SEQ ID NO: 138373 - DNA, 20 bp, Artificial Sequence
  mmSKRIPTE0009152_Il17d_1
  gRNA
gcctctcgactgcatccccg

SEQ ID NO: 138374 - DNA, 20 bp, Artificial Sequence
  mmSKRIPTE0009153_Il17d_2
  gRNA
acagtttaacaccggagact

SEQ ID NO: 138375 - DNA, 20 bp, Artificial Sequence
  mmSKRIPTE0009154_Il17d_3
  gRNA
gcactcaagaatcctactag

SEQ ID NO: 138376 - DNA, 20 bp, Artificial Sequence
  mmSKRIPTE0009155_Il17d_4
  gRNA
ggtgactggcctcgacgcct

SEQ ID NO: 138377 - DNA, 20 bp, Artificial Sequence
  mmSKRIPTE0009156_Il17d_5
  gRNA
ataagggcgccgcacacgcg

SEQ ID NO: 138378 - DNA, 20 bp, Artificial Sequence
  mmSKRIPTE0009157_Il17d_6
  gRNA
agtgttcggcgtacacagag

SEQ ID NO: 138379 - DNA, 20 bp, Artificial Sequence
  mmSKRIPTE0009158_Il17d_7
  gRNA
cggaaagcgagcagggtcgt

SEQ ID NO: 138380 - DNA, 20 bp, Artificial Sequence
  mmSKRIPTE0009159_Il17d_8
  gRNA
ccgccagtccacttctgtag

SEQ ID NO: 138381 - DNA, 20 bp, Artificial Sequence
  mmSKRIPTE0009160_Il17d_9
  gRNA
acaggccgagctcagcgtcg

SEQ ID NO: 138382 - DNA, 20 bp, Artificial Sequence
  mmSKRIPTE0009161_Ctnnbip1_1
  gRNA
aggactcacggggcaccgag

SEQ ID NO: 138383 - DNA, 20 bp, Artificial Sequence
  mmSKRIPTE0009162_Ctnnbip1_2
  gRNA
agacggggagaagcgttatg

SEQ ID NO: 138384 - DNA, 20 bp, Artificial Sequence
  mmSKRIPTE0009163_Ctnnbip1_3
  gRNA
tcttcccgggtgctccctcg

SEQ ID NO: 138385 - DNA, 20 bp, Artificial Sequence
  mmSKRIPTE0009164_Ctnnbip1_4
  gRNA
atggggtgcatcacttacag

SEQ ID NO: 138386 - DNA, 20 bp, Artificial Sequence
  mmSKRIPTE0009165_Ctnnbip1_5
  gRNA
ccacagcactccatcgacca

SEQ ID NO: 138387 - DNA, 20 bp, Artificial Sequence
  mmSKRIPTE0009166_Ctnnbip1_6
  gRNA
agatggccaagagatctgtg

SEQ ID NO: 138388 - DNA, 20 bp, Artificial Sequence
  mmSKRIPTE0009167_Ctnnbip1_7
  gRNA
tgcaaagggtaagaagacgg

SEQ ID NO: 138389 - DNA, 20 bp, Artificial Sequence
  mmSKRIPTE0009168_Ctnnbip1_8
  gRNA
gtgactgctagacactaacg

SEQ ID NO: 138390 - DNA, 20 bp, Artificial Sequence
  mmSKRIPTE0009169_Ctnnbip1_9
  gRNA
cctgtctggtcccagcagcg

SEQ ID NO: 138391 - DNA, 20 bp, Artificial Sequence
  mmSKRIPTE0009170_Hoxa7_1
  gRNA
tggagttaaataaatttacg

SEQ ID NO: 138392 - DNA, 20 bp, Artificial Sequence
  mmSKRIPTE0009171_Hoxa7_2
  gRNA
agagctgaggcgccatagcg

SEQ ID NO: 138393 - DNA, 20 bp, Artificial Sequence
  mmSKRIPTE0009172_Hoxa7_3
  gRNA
tgatgagtgagggatcccgg

SEQ ID NO: 138394 - DNA, 20 bp, Artificial Sequence
  mmSKRIPTE0009173_Hoxa7_4
  gRNA
atgtgggcggtcacgtgccg

SEQ ID NO: 138395 - DNA, 20 bp, Artificial Sequence
  mmSKRIPTE0009174_Hoxa7_5
  gRNA
ggtaggctcagtggtcggcg

SEQ ID NO: 138396 - DNA, 20 bp, Artificial Sequence
  mmSKRIPTE0009175_Hoxa7_6
  gRNA
attgtataagcccggcacag

SEQ ID NO: 138397 - DNA, 20 bp, Artificial Sequence
  mmSKRIPTE0009176_Hoxa7_7
  gRNA
ggccatagccggacgcgaag

SEQ ID NO: 138398 - DNA, 20 bp, Artificial Sequence
  mmSKRIPTE0009177_Hoxa7_8
  gRNA
atgagggtcgcccactagca

SEQ ID NO: 138399 - DNA, 20 bp, Artificial Sequence
  mmSKRIPTE0009178_Hoxa7_9
  gRNA
gctccgtccaaaagaaaatg

SEQ ID NO: 138400 - DNA, 20 bp, Artificial Sequence
  mmSKRIPTE0009179_Clec2d_1
  gRNA
gatcccgttgttgttcaggt

SEQ ID NO: 138401 - DNA, 20 bp, Artificial Sequence
  mmSKRIPTE0009180_Clec2d_2
  gRNA
taactaaaggcctcccaccg

SEQ ID NO: 138402 - DNA, 20 bp, Artificial Sequence
  mmSKRIPTE0009181_Clec2d_3
  gRNA
acacacgcttggttggctca

SEQ ID NO: 138403 - DNA, 20 bp, Artificial Sequence
  mmSKRIPTE0009182_Clec2d_4
  gRNA
tgtgggactaagcataggta

SEQ ID NO: 138404 - DNA, 20 bp, Artificial Sequence
  mmSKRIPTE0009183_Clec2d_5
  gRNA
ttgtggctatgggagatgaa

SEQ ID NO: 138405 - DNA, 20 bp, Artificial Sequence
  mmSKRIPTE0009184_Clec2d_6
  gRNA
ctgagaggcacaaatacgtg

SEQ ID NO: 138406 - DNA, 20 bp, Artificial Sequence
  mmSKRIPTE0009185_Clec2d_7
  gRNA
ctctagaggaatctgtggag

SEQ ID NO: 138407 - DNA, 20 bp, Artificial Sequence
  mmSKRIPTE0009186_Clec2d_8
  gRNA
gggcgaatgtccagttactt

SEQ ID NO: 138408 - DNA, 20 bp, Artificial Sequence
  mmSKRIPTE0009187_Clec2d_9
  gRNA
aatctttcctctccccggat

SEQ ID NO: 138409 - DNA, 20 bp, Artificial Sequence
  mmSKRIPTE0009188_Tyrobp_1
  gRNA
tgtgacgtccaaccaagtga

SEQ ID NO: 138410 - DNA, 20 bp, Artificial Sequence
  mmSKRIPTE0009189_Tyrobp_2
  gRNA
cgttggaatacagatccaca

SEQ ID NO: 138411 - DNA, 20 bp, Artificial Sequence
  mmSKRIPTE0009190_Tyrobp_3
  gRNA
agtcccgtacaggcccagag

SEQ ID NO: 138412 - DNA, 20 bp, Artificial Sequence
  mmSKRIPTE0009191_Tyrobp_4
  gRNA
gggacacaggttaacaatca

SEQ ID NO: 138413 - DNA, 20 bp, Artificial Sequence
  mmSKRIPTE0009192_Tyrobp_5
  gRNA
caatgtcagatatctcaggg

SEQ ID NO: 138414 - DNA, 20 bp, Artificial Sequence
  mmSKRIPTE0009193_Tyrobp_6
  gRNA
gctgacgaattgggtaacag

SEQ ID NO: 138415 - DNA, 20 bp, Artificial Sequence
  mmSKRIPTE0009194_Tyrobp_7
  gRNA
tcccccctactgatactacc

SEQ ID NO: 138416 - DNA, 20 bp, Artificial Sequence
  mmSKRIPTE0009195_Tyrobp_8
  gRNA
tgttcagcccattgggaccg

SEQ ID NO: 138417 - DNA, 20 bp, Artificial Sequence
  mmSKRIPTE0009196_Tyrobp_9
  gRNA
ggaggaggaacgtatagaca

SEQ ID NO: 138418 - DNA, 20 bp, Artificial Sequence
  mmSKRIPTE0009197_Cd1d1_1
  gRNA
gctcccggactggtacacaa

SEQ ID NO: 138419 - DNA, 20 bp, Artificial Sequence
  mmSKRIPTE0009198_Cd1d1_2
  gRNA
cagagccagcaaaacccgga

SEQ ID NO: 138420 - DNA, 20 bp, Artificial Sequence
  mmSKRIPTE0009199_Cd1d1_3
  gRNA
ctggtcccgcacagacagcg

SEQ ID NO: 138421 - DNA, 20 bp, Artificial Sequence
  mmSKRIPTE0009200_Cd1d1_4
  gRNA
ctgcccaaacagacgctctg

SEQ ID NO: 138422 - DNA, 20 bp, Artificial Sequence
  mmSKRIPTE0009201_Cd1d1_5
  gRNA
agcgcacacaatctagagaa

SEQ ID NO: 138423 - DNA, 20 bp, Artificial Sequence
  mmSKRIPTE0009202_Cd1d1_6
  gRNA
tccaaccctcaactaccagg

SEQ ID NO: 138424 - DNA, 20 bp, Artificial Sequence
  mmSKRIPTE0009203_Cd1d1_7
  gRNA
ccaattaatgataactccaa

SEQ ID NO: 138425 - DNA, 20 bp, Artificial Sequence
  mmSKRIPTE0009204_Cd1d1_8
  gRNA
aaaggaaagaacttagcgag

SEQ ID NO: 138426 - DNA, 20 bp, Artificial Sequence
  mmSKRIPTE0009205_Cd1d1_9
  gRNA
atttgtccgtggtctcctag

SEQ ID NO: 138427 - DNA, 20 bp, Artificial Sequence
  mmSKRIPTE0009206_Ifnk_1
  gRNA
cagggaacatcctcactccg

SEQ ID NO: 138428 - DNA, 20 bp, Artificial Sequence
  mmSKRIPTE0009207_Ifnk_2
  gRNA
agacagcaaacattacacga

SEQ ID NO: 138429 - DNA, 20 bp, Artificial Sequence
  mmSKRIPTE0009208_Ifnk_3
  gRNA
tgccagagaggatatacgat

SEQ ID NO: 138430 - DNA, 20 bp, Artificial Sequence
  mmSKRIPTE0009209_Ifnk_4
  gRNA
tgcatggaagattgtcacag

SEQ ID NO: 138431 - DNA, 20 bp, Artificial Sequence
  mmSKRIPTE0009210_Ifnk_5
  gRNA
acacagttcagagattggat

SEQ ID NO: 138432 - DNA, 20 bp, Artificial Sequence
  mmSKRIPTE0009211_Ifnk_6
  gRNA
ctcggaaaaaaagcgcctgg

SEQ ID NO: 138433 - DNA, 20 bp, Artificial Sequence
  mmSKRIPTE0009212_Ifnk_7
  gRNA
tggctgtgcagtgcatgatg

SEQ ID NO: 138434 - DNA, 20 bp, Artificial Sequence
  mmSKRIPTE0009213_Ifnk_8
  gRNA
tagatatggttgtcgtatca

SEQ ID NO: 138435 - DNA, 20 bp, Artificial Sequence
  mmSKRIPTE0009214_Ifnk_9
  gRNA
cctagtaaacctgacacaca

SEQ ID NO: 138436 - DNA, 20 bp, Artificial Sequence
  mmSKRIPTE0009215_Gm13288_1
  gRNA
gcatcaatatcaatctcact

SEQ ID NO: 138437 - DNA, 20 bp, Artificial Sequence
  mmSKRIPTE0009216_Gm13288_2
  gRNA
ataaagctgtcttcaacgaa

SEQ ID NO: 138438 - DNA, 20 bp, Artificial Sequence
  mmSKRIPTE0009217_Gm13288_3
  gRNA
atcttgatgaaacatgagat

SEQ ID NO: 138439 - DNA, 20 bp, Artificial Sequence
  mmSKRIPTE0009218_Gm13288_4
  gRNA
cttcactagaccatttacaa

SEQ ID NO: 138440 - DNA, 20 bp, Artificial Sequence
  mmSKRIPTE0009219_Gm13288_5
  gRNA
tagcagcttgtatggaacct

SEQ ID NO: 138441 - DNA, 20 bp, Artificial Sequence
  mmSKRIPTE0009220_Gm13288_6
  gRNA
gactagggtttacataggga

SEQ ID NO: 138442 - DNA, 20 bp, Artificial Sequence
  mmSKRIPTE0009221_Gm13288_7
  gRNA
ttggaactgaggagttagtg

SEQ ID NO: 138443 - DNA, 20 bp, Artificial Sequence
  mmSKRIPTE0009222_Gm13288_8
  gRNA
taggatagcccactgacacc

SEQ ID NO: 138444 - DNA, 20 bp, Artificial Sequence
  mmSKRIPTE0009223_Gm13288_9
  gRNA
cctgaggcctatagagccag

SEQ ID NO: 138445 - DNA, 20 bp, Artificial Sequence
  mmSKRIPTE0009224_Tnfrsf4_1
  gRNA
tggatgccggtggagccgaa

SEQ ID NO: 138446 - DNA, 20 bp, Artificial Sequence
  mmSKRIPTE0009225_Tnfrsf4_2
  gRNA
cttcaggaccccgatccagg

SEQ ID NO: 138447 - DNA, 20 bp, Artificial Sequence
  mmSKRIPTE0009226_Tnfrsf4_3
  gRNA
cacaggtccagaatacgtgg

SEQ ID NO: 138448 - DNA, 20 bp, Artificial Sequence
  mmSKRIPTE0009227_Tnfrsf4_4
  gRNA
tacgcctgtgccaaatacac

SEQ ID NO: 138449 - DNA, 20 bp, Artificial Sequence
  mmSKRIPTE0009228_Tnfrsf4_5
  gRNA
tagctagcgcatttcctatg

SEQ ID NO: 138450 - DNA, 20 bp, Artificial Sequence
  mmSKRIPTE0009229_Tnfrsf4_6
  gRNA
actgtggatacacagcaccg

SEQ ID NO: 138451 - DNA, 20 bp, Artificial Sequence
  mmSKRIPTE0009230_Tnfrsf4_7
  gRNA
tccactcagagacctacact

SEQ ID NO: 138452 - DNA, 20 bp, Artificial Sequence
  mmSKRIPTE0009231_Tnfrsf4_8
  gRNA
ttagtgatcaggattcattg

SEQ ID NO: 138453 - DNA, 20 bp, Artificial Sequence
  mmSKRIPTE0009232_Tnfrsf4_9
  gRNA
tcatggtccttgattcaagg

SEQ ID NO: 138454 - DNA, 20 bp, Artificial Sequence
  mmSKRIPTE0009233_Cxcl15_1
  gRNA
gcatcttcggtaagctaacg

SEQ ID NO: 138455 - DNA, 20 bp, Artificial Sequence
  mmSKRIPTE0009234_Cxcl15_2
  gRNA
gctaagtggtcagaacgtgg

SEQ ID NO: 138456 - DNA, 20 bp, Artificial Sequence
  mmSKRIPTE0009235_Cxcl15_3
  gRNA
gctcaagtgaggccgttctg

SEQ ID NO: 138457 - DNA, 20 bp, Artificial Sequence
  mmSKRIPTE0009236_Cxcl15_4
  gRNA
caaagaagtatttcaccctg

SEQ ID NO: 138458 - DNA, 20 bp, Artificial Sequence
  mmSKRIPTE0009237_Cxcl15_5
  gRNA
gtcacagggacggactgtag

SEQ ID NO: 138459 - DNA, 20 bp, Artificial Sequence
  mmSKRIPTE0009238_Cxcl15_6
  gRNA
acttaggagccaatacagca

SEQ ID NO: 138460 - DNA, 20 bp, Artificial Sequence
  mmSKRIPTE0009239_Cxcl15_7
  gRNA
taactataatatctgcaaca

SEQ ID NO: 138461 - DNA, 20 bp, Artificial Sequence
  mmSKRIPTE0009240_Cxcl15_8
  gRNA
taaatcagcaaagtgtctag

SEQ ID NO: 138462 - DNA, 20 bp, Artificial Sequence
  mmSKRIPTE0009241_Cxcl15_9
  gRNA
agtcaggccacagacggaca

SEQ ID NO: 138463 - DNA, 20 bp, Artificial Sequence
  mmSKRIPTE0009242_Fkbp1b_1
  gRNA
gtgtggtgcactacacaggt

SEQ ID NO: 138464 - DNA, 20 bp, Artificial Sequence
  mmSKRIPTE0009243_Fkbp1b_2
  gRNA
ctgcccaggtaggctaagga

SEQ ID NO: 138465 - DNA, 20 bp, Artificial Sequence
  mmSKRIPTE0009244_Fkbp1b_3
  gRNA
gaggtgtttgactttctcgg

SEQ ID NO: 138466 - DNA, 20 bp, Artificial Sequence
  mmSKRIPTE0009245_Fkbp1b_4
  gRNA
ctgattccgaggtggctccg

SEQ ID NO: 138467 - DNA, 20 bp, Artificial Sequence
  mmSKRIPTE0009246_Fkbp1b_5
  gRNA
ttctgcgcccgctcaccttg

SEQ ID NO: 138468 - DNA, 20 bp, Artificial Sequence
  mmSKRIPTE0009247_Fkbp1b_6
  gRNA
tagctccataggccacatca

SEQ ID NO: 138469 - DNA, 20 bp, Artificial Sequence
  mmSKRIPTE0009248_Fkbp1b_7
  gRNA
tcaaagatgcgggcgacagg

SEQ ID NO: 138470 - DNA, 20 bp, Artificial Sequence
  mmSKRIPTE0009249_Fkbp1b_8
  gRNA
ctggagtcaggacctgcgcg

SEQ ID NO: 138471 - DNA, 20 bp, Artificial Sequence
  mmSKRIPTE0009250_Fkbp1b_9
  gRNA
aatcctaggaggaatgcctg

SEQ ID NO: 138472 - DNA, 20 bp, Artificial Sequence
  mmSKRIPTE0009251_Ighm_1
  gRNA
tacctgtgttgtaggccacg

SEQ ID NO: 138473 - DNA, 20 bp, Artificial Sequence
  mmSKRIPTE0009252_Ighm_2
  gRNA
gaccatgctagcgctcaacc

SEQ ID NO: 138474 - DNA, 20 bp, Artificial Sequence
  mmSKRIPTE0009253_Ighm_3
  gRNA
gaggacttccctaatctggg

SEQ ID NO: 138475 - DNA, 20 bp, Artificial Sequence
  mmSKRIPTE0009254_Ighm_4
  gRNA
ccttcctgtacctcataggg

SEQ ID NO: 138476 - DNA, 20 bp, Artificial Sequence
  mmSKRIPTE0009255_Ighm_5
  gRNA
ttaccatctctgaaatcgac

SEQ ID NO: 138477 - DNA, 20 bp, Artificial Sequence
  mmSKRIPTE0009256_Ighm_6
  gRNA
gtatgcaaaatccactacgg

SEQ ID NO: 138478 - DNA, 20 bp, Artificial Sequence
  mmSKRIPTE0009257_Ighm_7
  gRNA
gggagacagcaacacctgcg

SEQ ID NO: 138479 - DNA, 20 bp, Artificial Sequence
  mmSKRIPTE0009258_Ighm_8
  gRNA
ctgccttaagagtagcaaca

SEQ ID NO: 138480 - DNA, 20 bp, Artificial Sequence
  mmSKRIPTE0009259_Ighm_9
  gRNA
gctaaaggatgggaagctcg

SEQ ID NO: 138481 - DNA, 20 bp, Artificial Sequence
  mmSKRIPTE0009260_Ifna2_1
  gRNA
tcatcactatcagcatcacg

SEQ ID NO: 138482 - DNA, 20 bp, Artificial Sequence
  mmSKRIPTE0009261_Ifna2_2
  gRNA
tcttggcagcaagttgactg

SEQ ID NO: 138483 - DNA, 20 bp, Artificial Sequence
  mmSKRIPTE0009262_Ifna2_3
  gRNA
agatgcagtttctagtccag

SEQ ID NO: 138484 - DNA, 20 bp, Artificial Sequence
  mmSKRIPTE0009263_Ifna2_4
  gRNA
gcaaacctgtctgatgcagc

SEQ ID NO: 138485 - DNA, 20 bp, Artificial Sequence
  mmSKRIPTE0009264_Ifna2_5
  gRNA
atggaacccacatgcgtgag

SEQ ID NO: 138486 - DNA, 20 bp, Artificial Sequence
  mmSKRIPTE0009265_Ifna2_6
  gRNA
ggagcctcctcatctgtgcc

SEQ ID NO: 138487 - DNA, 20 bp, Artificial Sequence
  mmSKRIPTE0009266_Tyk2_1
  gRNA
gagccagctgtataccggtg

SEQ ID NO: 138488 - DNA, 20 bp, Artificial Sequence
  mmSKRIPTE0009267_Tyk2_2
  gRNA
gagtgatgcctggaacacgg

SEQ ID NO: 138489 - DNA, 20 bp, Artificial Sequence
  mmSKRIPTE0009268_Tyk2_3
  gRNA
tggtctctctcatcaaacgc

SEQ ID NO: 138490 - DNA, 20 bp, Artificial Sequence
  mmSKRIPTE0009269_Tyk2_4
  gRNA
catgtgacatagcaccagtg

SEQ ID NO: 138491 - DNA, 20 bp, Artificial Sequence
  mmSKRIPTE0009270_Tyk2_5
  gRNA
gcttatgtcaggacccctag

SEQ ID NO: 138492 - DNA, 20 bp, Artificial Sequence
  mmSKRIPTE0009271_Tyk2_6
  gRNA
gtgtccctacccaacctgca

SEQ ID NO: 138493 - DNA, 20 bp, Artificial Sequence
  mmSKRIPTE0009272_Tyk2_7
  gRNA
tctgcgggacctgtctagcg

SEQ ID NO: 138494 - DNA, 20 bp, Artificial Sequence
  mmSKRIPTE0009273_Tyk2_8
  gRNA
gggcatttagaccatttcag

SEQ ID NO: 138495 - DNA, 20 bp, Artificial Sequence
  mmSKRIPTE0009274_Tyk2_9
  gRNA
gcatgagttcatgaacgatg

SEQ ID NO: 138496 - DNA, 20 bp, Artificial Sequence
  mmSKRIPTE0009275_Ccl2_1
  gRNA
tccacgacaattcaaaaatg

SEQ ID NO: 138497 - DNA, 20 bp, Artificial Sequence
  mmSKRIPTE0009276_Ccl2_2
  gRNA
gtagtgtgagttacataccc

SEQ ID NO: 138498 - DNA, 20 bp, Artificial Sequence
  mmSKRIPTE0009277_Ccl2_3
  gRNA
cacttcctggaaacacccga

SEQ ID NO: 138499 - DNA, 20 bp, Artificial Sequence
  mmSKRIPTE0009278_Ccl2_4
  gRNA
cacctggctgagccaacacg

SEQ ID NO: 138500 - DNA, 20 bp, Artificial Sequence
  mmSKRIPTE0009279_Ccl2_5
  gRNA
aggttgggacacatattgtg

SEQ ID NO: 138501 - DNA, 20 bp, Artificial Sequence
  mmSKRIPTE0009280_Ccl2_6
  gRNA
gcatcaccctggataagtga

SEQ ID NO: 138502 - DNA, 20 bp, Artificial Sequence
  mmSKRIPTE0009281_Ccl2_7
  gRNA
gggctgtgtagagctcagcg

SEQ ID NO: 138503 - DNA, 20 bp, Artificial Sequence
  mmSKRIPTE0009282_Ccl2_8
  gRNA
gaaaaacctttggaccaggg

SEQ ID NO: 138504 - DNA, 20 bp, Artificial Sequence
  mmSKRIPTE0009283_Ccl2_9
  gRNA
aagcaatcttgtaattgggt

SEQ ID NO: 138505 - DNA, 20 bp, Artificial Sequence
  mmSKRIPTE0009284_H2-M10.2_1
  gRNA
ggtcagggtgatccagctcg

SEQ ID NO: 138506 - DNA, 20 bp, Artificial Sequence
  mmSKRIPTE0009285_H2-M10.2_2
  gRNA
gtgaatgtaggcgcagcgga

SEQ ID NO: 138507 - DNA, 20 bp, Artificial Sequence
  mmSKRIPTE0009286_H2-M10.2_3
  gRNA
tagccgacctggatgatccg

SEQ ID NO: 138508 - DNA, 20 bp, Artificial Sequence
  mmSKRIPTE0009287_H2-M10.2_4
  gRNA
cctaaccagatcacagtctg

SEQ ID NO: 138509 - DNA, 20 bp, Artificial Sequence
  mmSKRIPTE0009288_H2-M10.2_5
  gRNA
aatcggcatctgccacatca

SEQ ID NO: 138510 - DNA, 20 bp, Artificial Sequence
  mmSKRIPTE0009289_H2-M10.2_6
  gRNA
gttggggacaaatcccggga

SEQ ID NO: 138511 - DNA, 20 bp, Artificial Sequence
  mmSKRIPTE0009290_H2-M10.2_7
  gRNA
gcttattgggccaaaccagg

SEQ ID NO: 138512 - DNA, 20 bp, Artificial Sequence
  mmSKRIPTE0009291_H2-M10.2_8
  gRNA
cgtttgtcagtgacaagcgc

SEQ ID NO: 138513 - DNA, 20 bp, Artificial Sequence
  mmSKRIPTE0009292_H2-M10.2_9
  gRNA
agatgggaaaaactacaccc

SEQ ID NO: 138514 - DNA, 20 bp, Artificial Sequence
  mmSKRIPTE0009293_Adora3_1
  gRNA
atgtagggtagatcttaaca

SEQ ID NO: 138515 - DNA, 20 bp, Artificial Sequence
  mmSKRIPTE0009294_Adora3_2
  gRNA
tttactgataccacatgcga

SEQ ID NO: 138516 - DNA, 20 bp, Artificial Sequence
  mmSKRIPTE0009295_Adora3_3
  gRNA
tcaggtaacagggttgacga

SEQ ID NO: 138517 - DNA, 20 bp, Artificial Sequence
  mmSKRIPTE0009296_Adora3_4
  gRNA
taagagagagtcataccgga

SEQ ID NO: 138518 - DNA, 20 bp, Artificial Sequence
  mmSKRIPTE0009297_Adora3_5
  gRNA
aatccaaactgaccacggaa

SEQ ID NO: 138519 - DNA, 20 bp, Artificial Sequence
  mmSKRIPTE0009298_Adora3_6
  gRNA
gtttgagtccaaagaatctg

SEQ ID NO: 138520 - DNA, 20 bp, Artificial Sequence
  mmSKRIPTE0009299_Adora3_7
  gRNA
atagtgctacaattgaacgg

SEQ ID NO: 138521 - DNA, 20 bp, Artificial Sequence
  mmSKRIPTE0009300_Adora3_8
  gRNA
ttgactcatttctacgaaag

SEQ ID NO: 138522 - DNA, 20 bp, Artificial Sequence
  mmSKRIPTE0009301_Adora3_9
  gRNA
gttcatcatggagttcgcgt

SEQ ID NO: 138523 - DNA, 20 bp, Artificial Sequence
  mmSKRIPTE0009302_Ccl20_1
  gRNA
gaggcgtctgtatgtacgag

SEQ ID NO: 138524 - DNA, 20 bp, Artificial Sequence
  mmSKRIPTE0009303_Ccl20_2
  gRNA
agaaggcgtgttctcacccg

SEQ ID NO: 138525 - DNA, 20 bp, Artificial Sequence
  mmSKRIPTE0009304_Ccl20_3
  gRNA
ctaagcgcccccatggattg

SEQ ID NO: 138526 - DNA, 20 bp, Artificial Sequence
  mmSKRIPTE0009305_Ccl20_4
  gRNA
ccatatctaggggttccctg

SEQ ID NO: 138527 - DNA, 20 bp, Artificial Sequence
  mmSKRIPTE0009306_Ccl20_5
  gRNA
ggagcacaggagcactcgca

SEQ ID NO: 138528 - DNA, 20 bp, Artificial Sequence
  mmSKRIPTE0009307_Ccl20_6
  gRNA
ctactgttgagaaggtgtga

SEQ ID NO: 138529 - DNA, 20 bp, Artificial Sequence
  mmSKRIPTE0009308_Ccl20_7
  gRNA
gaattggacacagcccaagg

SEQ ID NO: 138530 - DNA, 20 bp, Artificial Sequence
  mmSKRIPTE0009309_Ccl20_8
  gRNA
ccttcaatgatccatacctg

SEQ ID NO: 138531 - DNA, 20 bp, Artificial Sequence
  mmSKRIPTE0009310_Ccl20_9
  gRNA
gagttgatgtactcagtgct

SEQ ID NO: 138532 - DNA, 20 bp, Artificial Sequence
  mmSKRIPTE0009311_Mif_1
  gRNA
gggacgtagtctgacgtcag

SEQ ID NO: 138533 - DNA, 20 bp, Artificial Sequence
  mmSKRIPTE0009312_Mif_2
  gRNA
gcctggctcagctaagcacg

SEQ ID NO: 138534 - DNA, 20 bp, Artificial Sequence
  mmSKRIPTE0009313_Mif_3
  gRNA
tacataaggctgcataggag

SEQ ID NO: 138535 - DNA, 20 bp, Artificial Sequence
  mmSKRIPTE0009314_Mif_4
  gRNA
accactggactagtttagag

SEQ ID NO: 138536 - DNA, 20 bp, Artificial Sequence
  mmSKRIPTE0009315_Mif_5
  gRNA
gaagcccaggctctgaacgt

SEQ ID NO: 138537 - DNA, 20 bp, Artificial Sequence
  mmSKRIPTE0009316_Mif_6
  gRNA
acggaggatgctagatagtg

SEQ ID NO: 138538 - DNA, 20 bp, Artificial Sequence
  mmSKRIPTE0009317_Mif_7
  gRNA
ggagctctccggaagacctg

SEQ ID NO: 138539 - DNA, 20 bp, Artificial Sequence
  mmSKRIPTE0009318_Mif_8
  gRNA
tcagcgcgctgcttctgcag

SEQ ID NO: 138540 - DNA, 20 bp, Artificial Sequence
  mmSKRIPTE0009319_Mif_9
  gRNA
tgctgtaggaagtattacat

SEQ ID NO: 138541 - DNA, 20 bp, Artificial Sequence
  mmSKRIPTE0009320_Oas1c_1
  gRNA
tgacatgtaatgacaacacg

SEQ ID NO: 138542 - DNA, 20 bp, Artificial Sequence
  mmSKRIPTE0009321_Oas1c_2
  gRNA
aatctggccagcgtgcatcg

SEQ ID NO: 138543 - DNA, 20 bp, Artificial Sequence
  mmSKRIPTE0009322_Oas1c_3
  gRNA
tcaattcacttacagaggtg

SEQ ID NO: 138544 - DNA, 20 bp, Artificial Sequence
  mmSKRIPTE0009323_Oas1c_4
  gRNA
tcctagacctgcaagtccag

SEQ ID NO: 138545 - DNA, 20 bp, Artificial Sequence
  mmSKRIPTE0009324_Oas1c_5
  gRNA
attgcagcccgacaccctcg

SEQ ID NO: 138546 - DNA, 20 bp, Artificial Sequence
  mmSKRIPTE0009325_Oas1c_6
  gRNA
gctgctcactgtctatgtat

SEQ ID NO: 138547 - DNA, 20 bp, Artificial Sequence
  mmSKRIPTE0009326_Oas1c_7
  gRNA
ctgccttgggaatgctcgtg

SEQ ID NO: 138548 - DNA, 20 bp, Artificial Sequence
  mmSKRIPTE0009327_Oas1c_8
  gRNA
gaaacccagactagaatcca

SEQ ID NO: 138549 - DNA, 20 bp, Artificial Sequence
  mmSKRIPTE0009328_Oas1c_9
  gRNA
ggagatgccgagttgacaca

SEQ ID NO: 138550 - DNA, 20 bp, Artificial Sequence
  mmSKRIPTE0009329_Il31_1
  gRNA
cttcggtgccccaatatcga

SEQ ID NO: 138551 - DNA, 20 bp, Artificial Sequence
  mmSKRIPTE0009330_Il31_2
  gRNA
atcatgcacgtgatgctgct

SEQ ID NO: 138552 - DNA, 20 bp, Artificial Sequence
  mmSKRIPTE0009331_Il31_3
  gRNA
agtttgttaacgctccatgg

SEQ ID NO: 138553 - DNA, 20 bp, Artificial Sequence
  mmSKRIPTE0009332_Il31_4
  gRNA
aggctgttgtaactgaagct

SEQ ID NO: 138554 - DNA, 20 bp, Artificial Sequence
  mmSKRIPTE0009333_Il31_5
  gRNA
tggagccagcggtacctgtg

SEQ ID NO: 138555 - DNA, 20 bp, Artificial Sequence
  mmSKRIPTE0009334_Il31_6
  gRNA
tcccggtccaggctgaaaca

SEQ ID NO: 138556 - DNA, 20 bp, Artificial Sequence
  mmSKRIPTE0009335_Il31_7
  gRNA
accctttatatattgcctgg

SEQ ID NO: 138557 - DNA, 20 bp, Artificial Sequence
  mmSKRIPTE0009336_Il31_8
  gRNA
tgtgtggaagatcatggcga

SEQ ID NO: 138558 - DNA, 20 bp, Artificial Sequence
  mmSKRIPTE0009337_Il31_9
  gRNA
aggaacaacgaagcctaccc

SEQ ID NO: 138559 - DNA, 20 bp, Artificial Sequence
  mmSKRIPTE0009338_Mill2_1
  gRNA
gcaggtcacagttaccattg

SEQ ID NO: 138560 - DNA, 20 bp, Artificial Sequence
  mmSKRIPTE0009339_Mill2_2
  gRNA
aggtaacgagttcctgcctg

SEQ ID NO: 138561 - DNA, 20 bp, Artificial Sequence
  mmSKRIPTE0009340_Mill2_3
  gRNA
ctgctccttagagactcacg

SEQ ID NO: 138562 - DNA, 20 bp, Artificial Sequence
  mmSKRIPTE0009341_Mill2_4
  gRNA
ccagcccgccatgaagtgcg

SEQ ID NO: 138563 - DNA, 20 bp, Artificial Sequence
  mmSKRIPTE0009342_Mill2_5
  gRNA
ctgcattagtcacatcctgg

SEQ ID NO: 138564 - DNA, 20 bp, Artificial Sequence
  mmSKRIPTE0009343_Mill2_6
  gRNA
cccacccctaggtaagtgcg

SEQ ID NO: 138565 - DNA, 20 bp, Artificial Sequence
  mmSKRIPTE0009344_Mill2_7
  gRNA
ctagggaagtcacaacggag

SEQ ID NO: 138566 - DNA, 20 bp, Artificial Sequence
  mmSKRIPTE0009345_Mill2_8
  gRNA
ccacagcagtacaatcatct

SEQ ID NO: 138567 - DNA, 20 bp, Artificial Sequence
  mmSKRIPTE0009346_Mill2_9
  gRNA
gaccgtttctcaaggaagcg

SEQ ID NO: 138568 - DNA, 20 bp, Artificial Sequence
  mmSKRIPTE0009347_Cxcl17_1
  gRNA
gatgtgtttccctccaacag

SEQ ID NO: 138569 - DNA, 20 bp, Artificial Sequence
  mmSKRIPTE0009348_Cxcl17_2
  gRNA
atttctcaaacgatgtcacc

SEQ ID NO: 138570 - DNA, 20 bp, Artificial Sequence
  mmSKRIPTE0009349_Cxcl17_3
  gRNA
tgacctcatagggctgagtg

SEQ ID NO: 138571 - DNA, 20 bp, Artificial Sequence
  mmSKRIPTE0009350_Cxcl17_4
  gRNA
gctctatggtactccagaag

SEQ ID NO: 138572 - DNA, 20 bp, Artificial Sequence
  mmSKRIPTE0009351_Cxcl17_5
  gRNA
tgcctctttcataaagaccg

SEQ ID NO: 138573 - DNA, 20 bp, Artificial Sequence
  mmSKRIPTE0009352_Cxcl17_6
  gRNA
tcagttatatcgatcagatg

SEQ ID NO: 138574 - DNA, 20 bp, Artificial Sequence
  mmSKRIPTE0009353_Cxcl17_7
  gRNA
tgtttaccctacaagaatgc

SEQ ID NO: 138575 - DNA, 20 bp, Artificial Sequence
  mmSKRIPTE0009354_Cxcl17_8
  gRNA
gttagactctctcagtggaa

SEQ ID NO: 138576 - DNA, 20 bp, Artificial Sequence
  mmSKRIPTE0009355_Cxcl17_9
  gRNA
tggaggtgcacggtctatgt

SEQ ID NO: 138577 - DNA, 20 bp, Artificial Sequence
  mmSKRIPTE0009356_Adora1_1
  gRNA
ccattacatcttctccgctg

SEQ ID NO: 138578 - DNA, 20 bp, Artificial Sequence
  mmSKRIPTE0009357_Adora1_2
  gRNA
tggaaggccgagatgtacgg

SEQ ID NO: 138579 - DNA, 20 bp, Artificial Sequence
  mmSKRIPTE0009358_Adora1_3
  gRNA
gaagggtctcacatgacacg

SEQ ID NO: 138580 - DNA, 20 bp, Artificial Sequence
  mmSKRIPTE0009359_Adora1_4
  gRNA
tggctccttcagtcagacag

SEQ ID NO: 138581 - DNA, 20 bp, Artificial Sequence
  mmSKRIPTE0009360_Adora1_5
  gRNA
gcaatgagtgtcatgacgga

SEQ ID NO: 138582 - DNA, 20 bp, Artificial Sequence
  mmSKRIPTE0009361_Adora1_6
  gRNA
ggattgtgttcttggccacg

SEQ ID NO: 138583 - DNA, 20 bp, Artificial Sequence
  mmSKRIPTE0009362_Adora1_7
  gRNA
caaccggtagggggtcccaa

SEQ ID NO: 138584 - DNA, 20 bp, Artificial Sequence
  mmSKRIPTE0009363_Adora1_8
  gRNA
ccttcccgtagtacttctgg

SEQ ID NO: 138585 - DNA, 20 bp, Artificial Sequence
  mmSKRIPTE0009364_Adora1_9
  gRNA
tgagctccttgcctccgggt

SEQ ID NO: 138586 - DNA, 20 bp, Artificial Sequence
  mmSKRIPTE0009365_Cxcl16_1
  gRNA
gggctgcgttcttaatcccg

SEQ ID NO: 138587 - DNA, 20 bp, Artificial Sequence
  mmSKRIPTE0009366_Cxcl16_2
  gRNA
tctggcacccagataccgca

SEQ ID NO: 138588 - DNA, 20 bp, Artificial Sequence
  mmSKRIPTE0009367_Cxcl16_3
  gRNA
cagccgtgtatacagcccag

SEQ ID NO: 138589 - DNA, 20 bp, Artificial Sequence
  mmSKRIPTE0009368_Cxcl16_4
  gRNA
cgaccgtctggtcggtaccg

SEQ ID NO: 138590 - DNA, 20 bp, Artificial Sequence
  mmSKRIPTE0009369_Cxcl16_5
  gRNA
ctaacgaagaaagtgctatg

SEQ ID NO: 138591 - DNA, 20 bp, Artificial Sequence
  mmSKRIPTE0009370_Cxcl16_6
  gRNA
gaattggctggatgtcggct

SEQ ID NO: 138592 - DNA, 20 bp, Artificial Sequence
  mmSKRIPTE0009371_Cxcl16_7
  gRNA
gaatccgagtgagcaagctg

SEQ ID NO: 138593 - DNA, 20 bp, Artificial Sequence
  mmSKRIPTE0009372_Cxcl16_8
  gRNA
tggatcctactgagacccag

SEQ ID NO: 138594 - DNA, 20 bp, Artificial Sequence
  mmSKRIPTE0009373_Cxcl16_9
  gRNA
gaccctgccaggttagtcgg

SEQ ID NO: 138595 - DNA, 20 bp, Artificial Sequence
  mmSKRIPTE0009374_Ccl9_1
  gRNA
aaatccgctgggaaaccgag

SEQ ID NO: 138596 - DNA, 20 bp, Artificial Sequence
  mmSKRIPTE0009375_Ccl9_2
  gRNA
aagaccgcatgagtagtgat

SEQ ID NO: 138597 - DNA, 20 bp, Artificial Sequence
  mmSKRIPTE0009376_Ccl9_3
  gRNA
ccttctagacccctgatgag

SEQ ID NO: 138598 - DNA, 20 bp, Artificial Sequence
  mmSKRIPTE0009377_Ccl9_4
  gRNA
ggccaaccacaacagatttg

SEQ ID NO: 138599 - DNA, 20 bp, Artificial Sequence
  mmSKRIPTE0009378_Ccl9_5
  gRNA
attatctgtagtagggtgca

SEQ ID NO: 138600 - DNA, 20 bp, Artificial Sequence
  mmSKRIPTE0009379_Ccl9_6
  gRNA
gagatcctcgaatagaattg

SEQ ID NO: 138601 - DNA, 20 bp, Artificial Sequence
  mmSKRIPTE0009380_Ccl9_7
  gRNA
aaattgtaccatgggccggg

SEQ ID NO: 138602 - DNA, 20 bp, Artificial Sequence
  mmSKRIPTE0009381_Ccl9_8
  gRNA
tttaagcaaaagtcccgagt

SEQ ID NO: 138603 - DNA, 20 bp, Artificial Sequence
  mmSKRIPTE0009382_Ccl9_9
  gRNA
gcagtgtctctattgttcag

SEQ ID NO: 138604 - DNA, 20 bp, Artificial Sequence
  mmSKRIPTE0009383_Ccl4_1
  gRNA
aaatgttatctaactgacgg

SEQ ID NO: 138605 - DNA, 20 bp, Artificial Sequence
  mmSKRIPTE0009384_Ccl4_2
  gRNA
tataggacgcgtgtctccca

SEQ ID NO: 138606 - DNA, 20 bp, Artificial Sequence
  mmSKRIPTE0009385_Ccl4_3
  gRNA
cccagagtccctataaagag

SEQ ID NO: 138607 - DNA, 20 bp, Artificial Sequence
  mmSKRIPTE0009386_Ccl4_4
  gRNA
ctagtccagtcttccaactg

SEQ ID NO: 138608 - DNA, 20 bp, Artificial Sequence
  mmSKRIPTE0009387_Ccl4_5
  gRNA
gagcttcatggtgttgctcg

SEQ ID NO: 138609 - DNA, 20 bp, Artificial Sequence
  mmSKRIPTE0009388_Ccl4_6
  gRNA
atgagggcaagattcgaaaa

SEQ ID NO: 138610 - DNA, 20 bp, Artificial Sequence
  mmSKRIPTE0009389_Ccl4_7
  gRNA
aaatctgaacgtgaggagca

SEQ ID NO: 138611 - DNA, 20 bp, Artificial Sequence
  mmSKRIPTE0009390_Ccl4_8
  gRNA
gctggatgggcagtaaagtg

SEQ ID NO: 138612 - DNA, 20 bp, Artificial Sequence
  mmSKRIPTE0009391_Ccl4_9
  gRNA
agcacagatgagaaccccat

SEQ ID NO: 138613 - DNA, 20 bp, Artificial Sequence
  mmSKRIPTE0009392_Gli3_1
  gRNA
ctgaactgaacatccatgcg

SEQ ID NO: 138614 - DNA, 20 bp, Artificial Sequence
  mmSKRIPTE0009393_Gli3_2
  gRNA
gttctgatttggttcaaccg

SEQ ID NO: 138615 - DNA, 20 bp, Artificial Sequence
  mmSKRIPTE0009394_Gli3_3
  gRNA
ctctcatcactagacgtcga

SEQ ID NO: 138616 - DNA, 20 bp, Artificial Sequence
  mmSKRIPTE0009395_Gli3_4
  gRNA
gatctctttcttgatcagcg

SEQ ID NO: 138617 - DNA, 20 bp, Artificial Sequence
  mmSKRIPTE0009396_Gli3_5
  gRNA
gctgcagtgggattacggtg

SEQ ID NO: 138618 - DNA, 20 bp, Artificial Sequence
  mmSKRIPTE0009397_Gli3_6
  gRNA
cttcaggcgggacgtacctg

SEQ ID NO: 138619 - DNA, 20 bp, Artificial Sequence
  mmSKRIPTE0009398_Gli3_7
  gRNA
ttcccacatgacagacaccg

SEQ ID NO: 138620 - DNA, 20 bp, Artificial Sequence
  mmSKRIPTE0009399_Gli3_8
  gRNA
gcctgactgatcccagcgtg

SEQ ID NO: 138621 - DNA, 20 bp, Artificial Sequence
  mmSKRIPTE0009400_Gli3_9
  gRNA
agggcaagtctggatacgtc

SEQ ID NO: 138622 - DNA, 20 bp, Artificial Sequence
  mmSKRIPTE0009401_Trdv4_1
  gRNA
gaagcggaactgtagcaccg

SEQ ID NO: 138623 - DNA, 20 bp, Artificial Sequence
  mmSKRIPTE0009402_Trdv4_2
  gRNA
ctactgcactgtaacaggag

SEQ ID NO: 138624 - DNA, 20 bp, Artificial Sequence
  mmSKRIPTE0009403_Trdv4_3
  gRNA
gaaaggctagggtcagacga

SEQ ID NO: 138625 - DNA, 20 bp, Artificial Sequence
  mmSKRIPTE0009404_Trdv4_4
  gRNA
aggatgagtttgtaatcggc

SEQ ID NO: 138626 - DNA, 20 bp, Artificial Sequence
  mmSKRIPTE0009405_Trdv4_5
  gRNA
tgactgttaatgtaatcagg

SEQ ID NO: 138627 - DNA, 20 bp, Artificial Sequence
  mmSKRIPTE0009406_Trdv4_6
  gRNA
ctatctggcctgcaatcggg

SEQ ID NO: 138628 - DNA, 20 bp, Artificial Sequence
  mmSKRIPTE0009407_Trdv4_7
  gRNA
gacgctggtacgtactactg

SEQ ID NO: 138629 - DNA, 20 bp, Artificial Sequence
  mmSKRIPTE0009408_Trdv4_8
  gRNA
aagctagtgaggtcatggac

SEQ ID NO: 138630 - DNA, 20 bp, Artificial Sequence
  mmSKRIPTE0009409_Trdv4_9
  gRNA
caaaccccatccccttgggg

SEQ ID NO: 138631 - DNA, 20 bp, Artificial Sequence
  mmSKRIPTE0009410_Mir155_1
  gRNA
acatctacgttcatccagca

SEQ ID NO: 138632 - DNA, 20 bp, Artificial Sequence
  mmSKRIPTE0009411_Mir155_2
  gRNA
gacttgtcatcctcccacgg

SEQ ID NO: 138633 - DNA, 20 bp, Artificial Sequence
  mmSKRIPTE0009412_Mir155_3
  gRNA
tcctgttaatgctaacaggt

SEQ ID NO: 138634 - DNA, 20 bp, Artificial Sequence
  mmSKRIPTE0009413_Mir155_4
  gRNA
atttatcgtaacacttacag

SEQ ID NO: 138635 - DNA, 20 bp, Artificial Sequence
  mmSKRIPTE0009414_Mir155_5
  gRNA
gtgaacgattatgaatctga

SEQ ID NO: 138636 - DNA, 20 bp, Artificial Sequence
  mmSKRIPTE0009415_Mir155_6
  gRNA
agtggactatcctagtaacc

SEQ ID NO: 138637 - DNA, 20 bp, Artificial Sequence
  mmSKRIPTE0009416_Mir155_7
  gRNA
gcaggtgctgcaaaccagga

SEQ ID NO: 138638 - DNA, 20 bp, Artificial Sequence
  mmSKRIPTE0009417_Mir155_8
  gRNA
gttaatgctaattgtgatag

SEQ ID NO: 138639 - DNA, 20 bp, Artificial Sequence
  mmSKRIPTE0009418_Mir155_9
  gRNA
ctccagcagccagaggataa

SEQ ID NO: 138640 - DNA, 20 bp, Artificial Sequence
  mmSKRIPTE0009419_Cd226_1
  gRNA
gctttgctatcgtacaggga

SEQ ID NO: 138641 - DNA, 20 bp, Artificial Sequence
  mmSKRIPTE0009420_Cd226_2
  gRNA
gtttacgacattattcgttg

SEQ ID NO: 138642 - DNA, 20 bp, Artificial Sequence
  mmSKRIPTE0009421_Cd226_3
  gRNA
actttacagatgtcgctcag

SEQ ID NO: 138643 - DNA, 20 bp, Artificial Sequence
  mmSKRIPTE0009422_Cd226_4
  gRNA
attgacgcataacttaaccc

SEQ ID NO: 138644 - DNA, 20 bp, Artificial Sequence
  mmSKRIPTE0009423_Cd226_5
  gRNA
ttggcagtcaaacatcactg

SEQ ID NO: 138645 - DNA, 20 bp, Artificial Sequence
  mmSKRIPTE0009424_Cd226_6
  gRNA
gcagacaggtagctatccga

SEQ ID NO: 138646 - DNA, 20 bp, Artificial Sequence
  mmSKRIPTE0009425_Cd226_7
  gRNA
acttcctaaactcaacagtg

SEQ ID NO: 138647 - DNA, 20 bp, Artificial Sequence
  mmSKRIPTE0009426_Cd226_8
  gRNA
aagcaacccacttatctgca

SEQ ID NO: 138648 - DNA, 20 bp, Artificial Sequence
  mmSKRIPTE0009427_Cd226_9
  gRNA
tcgagtatgaaaagtgcatg

SEQ ID NO: 138649 - DNA, 20 bp, Artificial Sequence
  mmSKRIPTE0009428_Pilrb1_1
  gRNA
tggagcacacaagcgaccag

SEQ ID NO: 138650 - DNA, 20 bp, Artificial Sequence
  mmSKRIPTE0009429_Pilrb1_2
  gRNA
acccaactcaacgtgaccca

SEQ ID NO: 138651 - DNA, 20 bp, Artificial Sequence
  mmSKRIPTE0009430_Pilrb1_3
  gRNA
attaactcgactaaagtact

SEQ ID NO: 138652 - DNA, 20 bp, Artificial Sequence
  mmSKRIPTE0009431_Pilrb1_4
  gRNA
agtcagaaaagcatttcgcg

SEQ ID NO: 138653 - DNA, 20 bp, Artificial Sequence
  mmSKRIPTE0009432_Pilrb1_5
  gRNA
ctgtgtccggacaacgtgag

SEQ ID NO: 138654 - DNA, 20 bp, Artificial Sequence
  mmSKRIPTE0009433_Pilrb1_6
  gRNA
gatccccaggcattcacatg

SEQ ID NO: 138655 - DNA, 20 bp, Artificial Sequence
  mmSKRIPTE0009434_Pilrb1_7
  gRNA
ctgaggctgaatatgcaggg

SEQ ID NO: 138656 - DNA, 20 bp, Artificial Sequence
  mmSKRIPTE0009435_Pilrb1_8
  gRNA
tttctctctgacctgcatcg

SEQ ID NO: 138657 - DNA, 20 bp, Artificial Sequence
  mmSKRIPTE0009436_Pilrb1_9
  gRNA
gaaccacagcccaagaatag

SEQ ID NO: 138658 - DNA, 20 bp, Artificial Sequence
  mmSKRIPTE0009437_Ccl17_1
  gRNA
gcgtgggataacctccagag

SEQ ID NO: 138659 - DNA, 20 bp, Artificial Sequence
  mmSKRIPTE0009438_Ccl17_2
  gRNA
acagagggatactcacacga

SEQ ID NO: 138660 - DNA, 20 bp, Artificial Sequence
  mmSKRIPTE0009439_Ccl17_3
  gRNA
agagaatggtcactcgactc

SEQ ID NO: 138661 - DNA, 20 bp, Artificial Sequence
  mmSKRIPTE0009440_Ccl17_4
  gRNA
atggaaggcgttctgcactg

SEQ ID NO: 138662 - DNA, 20 bp, Artificial Sequence
  mmSKRIPTE0009441_Ccl17_5
  gRNA
aacgtactgacccagtctga

SEQ ID NO: 138663 - DNA, 20 bp, Artificial Sequence
  mmSKRIPTE0009442_Ccl17_6
  gRNA
catacatcggaacattccat

SEQ ID NO: 138664 - DNA, 20 bp, Artificial Sequence
  mmSKRIPTE0009443_Ccl17_7
  gRNA
catggccccatacaaatgag

SEQ ID NO: 138665 - DNA, 20 bp, Artificial Sequence
  mmSKRIPTE0009444_Ccl17_8
  gRNA
ctgcctggattacttcaaag

SEQ ID NO: 138666 - DNA, 20 bp, Artificial Sequence
  mmSKRIPTE0009445_Ccl17_9
  gRNA
tcagattggtgaaaaaccca

SEQ ID NO: 138667 - DNA, 20 bp, Artificial Sequence
  mmSKRIPTE0009446_Nradd_1
  gRNA
gacaggaatgatgttgctcg

SEQ ID NO: 138668 - DNA, 20 bp, Artificial Sequence
  mmSKRIPTE0009447_Nradd_2
  gRNA
ccactcagctaggaagacga

SEQ ID NO: 138669 - DNA, 20 bp, Artificial Sequence
  mmSKRIPTE0009448_Nradd_3
  gRNA
agccgaccaatcttgtgctg

SEQ ID NO: 138670 - DNA, 20 bp, Artificial Sequence
  mmSKRIPTE0009449_Nradd_4
  gRNA
cttctgcgtgctccggcgtg

SEQ ID NO: 138671 - DNA, 20 bp, Artificial Sequence
  mmSKRIPTE0009450_Nradd_5
  gRNA
aggcggcactcacaccaccg

SEQ ID NO: 138672 - DNA, 20 bp, Artificial Sequence
  mmSKRIPTE0009451_Nradd_6
  gRNA
aaggtgtggtctattcaggt

SEQ ID NO: 138673 - DNA, 20 bp, Artificial Sequence
  mmSKRIPTE0009452_Nradd_7
  gRNA
caggatcagagcactaaagg

SEQ ID NO: 138674 - DNA, 20 bp, Artificial Sequence
  mmSKRIPTE0009453_Nradd_8
  gRNA
ctagccgggctcttgctagg

SEQ ID NO: 138675 - DNA, 20 bp, Artificial Sequence
  mmSKRIPTE0009454_Nradd_9
  gRNA
gggtaccagcgtctgtgttg

SEQ ID NO: 138676 - DNA, 20 bp, Artificial Sequence
  mmSKRIPTE0009455_Csf2_1
  gRNA
atattcgagcagggtctacg

SEQ ID NO: 138677 - DNA, 20 bp, Artificial Sequence
  mmSKRIPTE0009456_Csf2_2
  gRNA
tcaatgctgtcatggccaaa

SEQ ID NO: 138678 - DNA, 20 bp, Artificial Sequence
  mmSKRIPTE0009457_Csf2_3
  gRNA
aatacagaaaccacttactg

SEQ ID NO: 138679 - DNA, 20 bp, Artificial Sequence
  mmSKRIPTE0009458_Csf2_4
  gRNA
ccctcccagactaagacctg

SEQ ID NO: 138680 - DNA, 20 bp, Artificial Sequence
  mmSKRIPTE0009459_Csf2_5
  gRNA
ggatgacatgcctgtcacgt

SEQ ID NO: 138681 - DNA, 20 bp, Artificial Sequence
  mmSKRIPTE0009460_Csf2_6
  gRNA
acgtgactgctacagaggaa

SEQ ID NO: 138682 - DNA, 20 bp, Artificial Sequence
  mmSKRIPTE0009461_Csf2_7
  gRNA
ccggccttggaagcatgtag

SEQ ID NO: 138683 - DNA, 20 bp, Artificial Sequence
  mmSKRIPTE0009462_Csf2_8
  gRNA
gtggcacagccacagttgga

SEQ ID NO: 138684 - DNA, 20 bp, Artificial Sequence
  mmSKRIPTE0009463_Csf2_9
  gRNA
gtccaggtaagtgggccacg

SEQ ID NO: 138685 - DNA, 20 bp, Artificial Sequence
  mmSKRIPTE0009464_Ighv7-4_1
  gRNA
gtaaaagctgtacacagcga

SEQ ID NO: 138686 - DNA, 20 bp, Artificial Sequence
  mmSKRIPTE0009465_Ighv7-4_2
  gRNA
atactgcatctgttaagggt

SEQ ID NO: 138687 - DNA, 20 bp, Artificial Sequence
  mmSKRIPTE0009466_Ighv7-4_3
  gRNA
atgttaagtagtaaaaggag

SEQ ID NO: 138688 - DNA, 20 bp, Artificial Sequence
  mmSKRIPTE0009467_Ighv7-4_4
  gRNA
aggctggggaaatcaagact

SEQ ID NO: 138689 - DNA, 20 bp, Artificial Sequence
  mmSKRIPTE0009468_Ighv7-4_5
  gRNA
tcttcaaatgaacaccctga

SEQ ID NO: 138690 - DNA, 20 bp, Artificial Sequence
  mmSKRIPTE0009469_Ighv7-4_6
  gRNA
gctacagcgagagtcttcac

SEQ ID NO: 138691 - DNA, 20 bp, Artificial Sequence
  mmSKRIPTE0009470_Ighv7-4_7
  gRNA
acctgtcaccatgaagttgt

SEQ ID NO: 138692 - DNA, 20 bp, Artificial Sequence
  mmSKRIPTE0009471_Ighv7-4_8
  gRNA
tggtaatttatggggaacaa

SEQ ID NO: 138693 - DNA, 20 bp, Artificial Sequence
  mmSKRIPTE0009472_Ighv7-4_9
  gRNA
ctaatcaaagccaaccactc

SEQ ID NO: 138694 - DNA, 20 bp, Artificial Sequence
  mmSKRIPTE0009473_Ighv3-6_1
  gRNA
ctaagttaaatcccctcttg

SEQ ID NO: 138695 - DNA, 20 bp, Artificial Sequence
  mmSKRIPTE0009474_Ighv3-6_2
  gRNA
gaaaacagggtgttgcctaa

SEQ ID NO: 138696 - DNA, 20 bp, Artificial Sequence
  mmSKRIPTE0009475_Ighv3-6_3
  gRNA
atgggctacataagctacga

SEQ ID NO: 138697 - DNA, 20 bp, Artificial Sequence
  mmSKRIPTE0009476_Ighv3-6_4
  gRNA
gtatgtgacaagccccctgt

SEQ ID NO: 138698 - DNA, 20 bp, Artificial Sequence
  mmSKRIPTE0009477_Ighv3-6_5
  gRNA
gagactgagaaggtttcacg

SEQ ID NO: 138699 - DNA, 20 bp, Artificial Sequence
  mmSKRIPTE0009478_Ighv3-6_6
  gRNA
cagcccagccttcataattg

SEQ ID NO: 138700 - DNA, 20 bp, Artificial Sequence
  mmSKRIPTE0009479_Ighv3-6_7
  gRNA
tatttcatacatgtaccatg

SEQ ID NO: 138701 - DNA, 20 bp, Artificial Sequence
  mmSKRIPTE0009480_Ighv3-6_8
  gRNA
cttagatgtgtcacgagtga

SEQ ID NO: 138702 - DNA, 20 bp, Artificial Sequence
  mmSKRIPTE0009481_Ighv3-6_9
  gRNA
ttcttgcccaaaactctggc

SEQ ID NO: 138703 - DNA, 20 bp, Artificial Sequence
  mmSKRIPTE0009482_Myc_1
  gRNA
attgaattaatgccaatgag

SEQ ID NO: 138704 - DNA, 20 bp, Artificial Sequence
  mmSKRIPTE0009483_Myc_2
  gRNA
cgtccgggattcaggaggcg

SEQ ID NO: 138705 - DNA, 20 bp, Artificial Sequence
  mmSKRIPTE0009484_Myc_3
  gRNA
gtagcgaccgcaacatagga

SEQ ID NO: 138706 - DNA, 20 bp, Artificial Sequence
  mmSKRIPTE0009485_Myc_4
  gRNA
cgagtgcattgacccctcag

SEQ ID NO: 138707 - DNA, 20 bp, Artificial Sequence
  mmSKRIPTE0009486_Myc_5
  gRNA
ggtcatcatctccagctgat

SEQ ID NO: 138708 - DNA, 20 bp, Artificial Sequence
  mmSKRIPTE0009487_Myc_6
  gRNA
tcgggctcatctccatcccg

SEQ ID NO: 138709 - DNA, 20 bp, Artificial Sequence
  mmSKRIPTE0009488_Myc_7
  gRNA
aagccccagccaaggttgtg

SEQ ID NO: 138710 - DNA, 20 bp, Artificial Sequence
  mmSKRIPTE0009489_Myc_8
  gRNA
gacgagcgtcactgatagta

SEQ ID NO: 138711 - DNA, 20 bp, Artificial Sequence
  mmSKRIPTE0009490_Myc_9
  gRNA
agggctaagtccctgctcga

SEQ ID NO: 138712 - DNA, 20 bp, Artificial Sequence
  mmSKRIPTE0009491_Fshb_1
  gRNA
aatgaaggaataaacgacga

SEQ ID NO: 138713 - DNA, 20 bp, Artificial Sequence
  mmSKRIPTE0009492_Fshb_2
  gRNA
tgcgggctactgctacacta

SEQ ID NO: 138714 - DNA, 20 bp, Artificial Sequence
  mmSKRIPTE0009493_Fshb_3
  gRNA
gcatttagactgctttggcg

SEQ ID NO: 138715 - DNA, 20 bp, Artificial Sequence
  mmSKRIPTE0009494_Fshb_4
  gRNA
tacgagaccgtaagattgcc

SEQ ID NO: 138716 - DNA, 20 bp, Artificial Sequence
  mmSKRIPTE0009495_Fshb_5
  gRNA
tgagcagcctaaccttgtgg

SEQ ID NO: 138717 - DNA, 20 bp, Artificial Sequence
  mmSKRIPTE0009496_Fshb_6
  gRNA
tggtgtataaggacccagct

SEQ ID NO: 138718 - DNA, 20 bp, Artificial Sequence
  mmSKRIPTE0009497_Fshb_7
  gRNA
taacacccagtaaatccaca

SEQ ID NO: 138719 - DNA, 20 bp, Artificial Sequence
  mmSKRIPTE0009498_Fshb_8
  gRNA
tggtccttcaggacaagggt

SEQ ID NO: 138720 - DNA, 20 bp, Artificial Sequence
  mmSKRIPTE0009499_Fshb_9
  gRNA
gctcaagccgaagacttgag

SEQ ID NO: 138721 - DNA, 20 bp, Artificial Sequence
  mmSKRIPTE0009500_Tlr4_1
  gRNA
attctcccaagatcaaccga

SEQ ID NO: 138722 - DNA, 20 bp, Artificial Sequence
  mmSKRIPTE0009501_Tlr4_2
  gRNA
aggcttccacaagagccgga

SEQ ID NO: 138723 - DNA, 20 bp, Artificial Sequence
  mmSKRIPTE0009502_Tlr4_3
  gRNA
ctaacttccctcctgcgacg

SEQ ID NO: 138724 - DNA, 20 bp, Artificial Sequence
  mmSKRIPTE0009503_Tlr4_4
  gRNA
taaatgctacagctcacctg

SEQ ID NO: 138725 - DNA, 20 bp, Artificial Sequence
  mmSKRIPTE0009504_Tlr4_5
  gRNA
tgaaggcagaggtgaaagcg

SEQ ID NO: 138726 - DNA, 20 bp, Artificial Sequence
  mmSKRIPTE0009505_Tlr4_6
  gRNA
aatgggaggacaatcctctg

SEQ ID NO: 138727 - DNA, 20 bp, Artificial Sequence
  mmSKRIPTE0009506_Tlr4_7
  gRNA
atggctgctaagctatagca

SEQ ID NO: 138728 - DNA, 20 bp, Artificial Sequence
  mmSKRIPTE0009507_Tlr4_8
  gRNA
tagatagctgagacttggta

SEQ ID NO: 138729 - DNA, 20 bp, Artificial Sequence
  mmSKRIPTE0009508_Tlr4_9
  gRNA
tctctgaggccagtattcac

SEQ ID NO: 138730 - DNA, 20 bp, Artificial Sequence
  mmSKRIPTE0009509_Cxcl13_1
  gRNA
taaactatcctagattgtcg

SEQ ID NO: 138731 - DNA, 20 bp, Artificial Sequence
  mmSKRIPTE0009510_Cxcl13_2
  gRNA
ataagtgaaagttctcaccg

SEQ ID NO: 138732 - DNA, 20 bp, Artificial Sequence
  mmSKRIPTE0009511_Cxcl13_3
  gRNA
gttctgctattgtcacacat

SEQ ID NO: 138733 - DNA, 20 bp, Artificial Sequence
  mmSKRIPTE0009512_Cxcl13_4
  gRNA
gatttgtggtgtgaggcctg

SEQ ID NO: 138734 - DNA, 20 bp, Artificial Sequence
  mmSKRIPTE0009513_Cxcl13_5
  gRNA
gtgtgaatcctcgtgccaaa

SEQ ID NO: 138735 - DNA, 20 bp, Artificial Sequence
  mmSKRIPTE0009514_Cxcl13_6
  gRNA
gcagctgacctaagaaagag

SEQ ID NO: 138736 - DNA, 20 bp, Artificial Sequence
  mmSKRIPTE0009515_Cxcl13_7
  gRNA
tttgcacccttgtaaaacgc

SEQ ID NO: 138737 - DNA, 20 bp, Artificial Sequence
  mmSKRIPTE0009516_Cxcl13_8
  gRNA
ttaccacatgcatctgaagt

SEQ ID NO: 138738 - DNA, 20 bp, Artificial Sequence
  mmSKRIPTE0009517_Cxcl13_9
  gRNA
gatgtgggttgggtatgcaa

SEQ ID NO: 138739 - DNA, 20 bp, Artificial Sequence
  mmSKRIPTE0009518_Ins2_1
  gRNA
gtcccaagttactaccacca

SEQ ID NO: 138740 - DNA, 20 bp, Artificial Sequence
  mmSKRIPTE0009519_Ins2_2
  gRNA
ggagggtctcgggataacca

SEQ ID NO: 138741 - DNA, 20 bp, Artificial Sequence
  mmSKRIPTE0009520_Ins2_3
  gRNA
gcaaaagtttcacgtaagag

SEQ ID NO: 138742 - DNA, 20 bp, Artificial Sequence
  mmSKRIPTE0009521_Ins2_4
  gRNA
tgtagcggatcacttagggc

SEQ ID NO: 138743 - DNA, 20 bp, Artificial Sequence
  mmSKRIPTE0009522_Ins2_5
  gRNA
aaccagggtagttagcactg

SEQ ID NO: 138744 - DNA, 20 bp, Artificial Sequence
  mmSKRIPTE0009523_Ins2_6
  gRNA
tttggtctataaaggtagtg

SEQ ID NO: 138745 - DNA, 20 bp, Artificial Sequence
  mmSKRIPTE0009524_Ins2_7
  gRNA
tccaggttattgtttcaaca

SEQ ID NO: 138746 - DNA, 20 bp, Artificial Sequence
  mmSKRIPTE0009525_Ins2_8
  gRNA
gagcaacctcctactacccc

SEQ ID NO: 138747 - DNA, 20 bp, Artificial Sequence
  mmSKRIPTE0009526_Ins2_9
  gRNA
gaggtggcccagcagaagcg

SEQ ID NO: 138748 - DNA, 20 bp, Artificial Sequence
  mmSKRIPTE0009527_Lax1_1
  gRNA
gggaatgccacggaccacga

SEQ ID NO: 138749 - DNA, 20 bp, Artificial Sequence
  mmSKRIPTE0009528_Lax1_2
  gRNA
ccctggccttattagcacac

SEQ ID NO: 138750 - DNA, 20 bp, Artificial Sequence
  mmSKRIPTE0009529_Lax1_3
  gRNA
ttgatcctgagaatccccca

SEQ ID NO: 138751 - DNA, 20 bp, Artificial Sequence
  mmSKRIPTE0009530_Lax1_4
  gRNA
tagagtgtccgttcatactg

SEQ ID NO: 138752 - DNA, 20 bp, Artificial Sequence
  mmSKRIPTE0009531_Lax1_5
  gRNA
tgcatgcagagggtaaactt

SEQ ID NO: 138753 - DNA, 20 bp, Artificial Sequence
  mmSKRIPTE0009532_Lax1_6
  gRNA
aatttcaggtgaaggtaggg

SEQ ID NO: 138754 - DNA, 20 bp, Artificial Sequence
  mmSKRIPTE0009533_Lax1_7
  gRNA
aaatgccacttataggctgt

SEQ ID NO: 138755 - DNA, 20 bp, Artificial Sequence
  mmSKRIPTE0009534_Lax1_8
  gRNA
ctggacaactctgaacagag

SEQ ID NO: 138756 - DNA, 20 bp, Artificial Sequence
  mmSKRIPTE0009535_Lax1_9
  gRNA
ggtggaggcagagtcaacga

SEQ ID NO: 138757 - DNA, 20 bp, Artificial Sequence
  mmSKRIPTE0009536_Klrd1_1
  gRNA
gtgactaggtcattcactcg

SEQ ID NO: 138758 - DNA, 20 bp, Artificial Sequence
  mmSKRIPTE0009537_Klrd1_2
  gRNA
aaacgctttgcctcgtggag

SEQ ID NO: 138759 - DNA, 20 bp, Artificial Sequence
  mmSKRIPTE0009538_Klrd1_3
  gRNA
taacctctccaacctgagca

SEQ ID NO: 138760 - DNA, 20 bp, Artificial Sequence
  mmSKRIPTE0009539_Klrd1_4
  gRNA
taaatcttcatgactcagag

SEQ ID NO: 138761 - DNA, 20 bp, Artificial Sequence
  mmSKRIPTE0009540_Klrd1_5
  gRNA
gcaagctttgaacaagaccc

SEQ ID NO: 138762 - DNA, 20 bp, Artificial Sequence
  mmSKRIPTE0009541_Klrd1_6
  gRNA
tagtttctaggatcactcgg

SEQ ID NO: 138763 - DNA, 20 bp, Artificial Sequence
  mmSKRIPTE0009542_Klrd1_7
  gRNA
actattacatctgctgacag

SEQ ID NO: 138764 - DNA, 20 bp, Artificial Sequence
  mmSKRIPTE0009543_Klrd1_8
  gRNA
gtatagacaaggaaggtcca

SEQ ID NO: 138765 - DNA, 20 bp, Artificial Sequence
  mmSKRIPTE0009544_Klrd1_9
  gRNA
aagaaatgcctggctatggg

SEQ ID NO: 138766 - DNA, 20 bp, Artificial Sequence
  mmSKRIPTE0009545_Ighv6-6_1
  gRNA
gatactgcatgtgattagag

SEQ ID NO: 138767 - DNA, 20 bp, Artificial Sequence
  mmSKRIPTE0009546_Ighv6-6_2
  gRNA
taccattctactatcaagtg

SEQ ID NO: 138768 - DNA, 20 bp, Artificial Sequence
  mmSKRIPTE0009547_Ighv6-6_3
  gRNA
tctttatagagctcttaggg

SEQ ID NO: 138769 - DNA, 20 bp, Artificial Sequence
  mmSKRIPTE0009548_Ighv6-6_4
  gRNA
gtgctatatcatgagttcag

SEQ ID NO: 138770 - DNA, 20 bp, Artificial Sequence
  mmSKRIPTE0009549_Ighv6-6_5
  gRNA
acctcagaaaacctgcagca

SEQ ID NO: 138771 - DNA, 20 bp, Artificial Sequence
  mmSKRIPTE0009550_Ighv6-6_6
  gRNA
ctggcggacccagtccatcc

SEQ ID NO: 138772 - DNA, 20 bp, Artificial Sequence
  mmSKRIPTE0009551_Ighv6-6_7
  gRNA
gcacagtggccatgtaaacc

SEQ ID NO: 138773 - DNA, 20 bp, Artificial Sequence
  mmSKRIPTE0009552_Ighv6-6_8
  gRNA
agaacattcacgatgtactt

SEQ ID NO: 138774 - DNA, 20 bp, Artificial Sequence
  mmSKRIPTE0009553_Ighv6-6_9
  gRNA
actatgctgagtctgtgaaa

SEQ ID NO: 138775 - DNA, 20 bp, Artificial Sequence
  mmSKRIPTE0009554_Tff2_1
  gRNA
tgataactgtcccttactcg

SEQ ID NO: 138776 - DNA, 20 bp, Artificial Sequence
  mmSKRIPTE0009555_Tff2_2
  gRNA
aggagggcactaatgttggg

SEQ ID NO: 138777 - DNA, 20 bp, Artificial Sequence
  mmSKRIPTE0009556_Tff2_3
  gRNA
accatcttgacccttagcag

SEQ ID NO: 138778 - DNA, 20 bp, Artificial Sequence
  mmSKRIPTE0009557_Tff2_4
  gRNA
aaccgttagagattccccaa

SEQ ID NO: 138779 - DNA, 20 bp, Artificial Sequence
  mmSKRIPTE0009558_Tff2_5
  gRNA
ctttgactctagcgtcgctg

SEQ ID NO: 138780 - DNA, 20 bp, Artificial Sequence
  mmSKRIPTE0009559_Tff2_6
  gRNA
ttcagaacctgtctatgatg

SEQ ID NO: 138781 - DNA, 20 bp, Artificial Sequence
  mmSKRIPTE0009560_Tff2_7
  gRNA
ggagcagacatgcgacctcg

SEQ ID NO: 138782 - DNA, 20 bp, Artificial Sequence
  mmSKRIPTE0009561_Tff2_8
  gRNA
cgcacacattcgcgtacgat

SEQ ID NO: 138783 - DNA, 20 bp, Artificial Sequence
  mmSKRIPTE0009562_Tff2_9
  gRNA
gctagcccaggttaacacga

SEQ ID NO: 138784 - DNA, 20 bp, Artificial Sequence
  mmSKRIPTE0009563_Ighv3-5_1
  gRNA
atagggtacatatactacag

SEQ ID NO: 138785 - DNA, 20 bp, Artificial Sequence
  mmSKRIPTE0009564_Ighv3-5_2
  gRNA
atgaaatggcaactctcacc

SEQ ID NO: 138786 - DNA, 20 bp, Artificial Sequence
  mmSKRIPTE0009565_Ighv3-5_3
  gRNA
gtctcgtgcacagtagtatg

SEQ ID NO: 138787 - DNA, 20 bp, Artificial Sequence
  mmSKRIPTE0009566_Ighv3-5_4
  gRNA
gaaaagggggtatagcctaa

SEQ ID NO: 138788 - DNA, 20 bp, Artificial Sequence
  mmSKRIPTE0009567_Ighv3-5_5
  gRNA
tcaccactggaaattacagg

SEQ ID NO: 138789 - DNA, 20 bp, Artificial Sequence
  mmSKRIPTE0009568_Ighv3-5_6
  gRNA
ctacaaggaggtttacatct

SEQ ID NO: 138790 - DNA, 20 bp, Artificial Sequence
  mmSKRIPTE0009569_Ighv3-5_7
  gRNA
aatgaactctttgactgctg

SEQ ID NO: 138791 - DNA, 20 bp, Artificial Sequence
  mmSKRIPTE0009570_Ighv3-5_8
  gRNA
gctcatatctgtcttacagg

SEQ ID NO: 138792 - DNA, 20 bp, Artificial Sequence
  mmSKRIPTE0009571_Ighv3-5_9
  gRNA
ttgccccatacacttagcac

SEQ ID NO: 138793 - DNA, 20 bp, Artificial Sequence
  mmSKRIPTE0009572_Id2_1
  gRNA
tgatgcaggctgacgatagt

SEQ ID NO: 138794 - DNA, 20 bp, Artificial Sequence
  mmSKRIPTE0009573_Id2_2
  gRNA
tgccgcttgacttaccacat

SEQ ID NO: 138795 - DNA, 20 bp, Artificial Sequence
  mmSKRIPTE0009574_Id2_3
  gRNA
aaggctttcatgctgctcgt

SEQ ID NO: 138796 - DNA, 20 bp, Artificial Sequence
  mmSKRIPTE0009575_Id2_4
  gRNA
ctcccggagcaaaaccccgg

SEQ ID NO: 138797 - DNA, 20 bp, Artificial Sequence
  mmSKRIPTE0009576_Id2_5
  gRNA
taccgaaacgcgcacacagg

SEQ ID NO: 138798 - DNA, 20 bp, Artificial Sequence
  mmSKRIPTE0009577_Id2_6
  gRNA
agaatgaagcgcgagccggg

SEQ ID NO: 138799 - DNA, 20 bp, Artificial Sequence
  mmSKRIPTE0009578_Id2_7
  gRNA
agggggctgagctgactgcg

SEQ ID NO: 138800 - DNA, 20 bp, Artificial Sequence
  mmSKRIPTE0009579_Id2_8
  gRNA
ttcagggatgcccgattgag

SEQ ID NO: 138801 - DNA, 20 bp, Artificial Sequence
  mmSKRIPTE0009580_Id2_9
  gRNA
taatgaacctgtctctacga

SEQ ID NO: 138802 - DNA, 20 bp, Artificial Sequence
  mmSKRIPTE0009581_P2rx7_1
  gRNA
acccactctgataggacgca

SEQ ID NO: 138803 - DNA, 20 bp, Artificial Sequence
  mmSKRIPTE0009582_P2rx7_2
  gRNA
tttcctacattaggtaagcg

SEQ ID NO: 138804 - DNA, 20 bp, Artificial Sequence
  mmSKRIPTE0009583_P2rx7_3
  gRNA
gggttgttgtcgcagttctg

SEQ ID NO: 138805 - DNA, 20 bp, Artificial Sequence
  mmSKRIPTE0009584_P2rx7_4
  gRNA
tgagcgataagctgtaccag

SEQ ID NO: 138806 - DNA, 20 bp, Artificial Sequence
  mmSKRIPTE0009585_P2rx7_5
  gRNA
aatgagaccctagaccccta

SEQ ID NO: 138807 - DNA, 20 bp, Artificial Sequence
  mmSKRIPTE0009586_P2rx7_6
  gRNA
tcaccagatatagacgcaga

SEQ ID NO: 138808 - DNA, 20 bp, Artificial Sequence
  mmSKRIPTE0009587_P2rx7_7
  gRNA
atatagcaccaagcatgacg

SEQ ID NO: 138809 - DNA, 20 bp, Artificial Sequence
  mmSKRIPTE0009588_P2rx7_8
  gRNA
actctccctgctacaaactg

SEQ ID NO: 138810 - DNA, 20 bp, Artificial Sequence
  mmSKRIPTE0009589_P2rx7_9
  gRNA
tagactgctgcatacccaca

SEQ ID NO: 138811 - DNA, 20 bp, Artificial Sequence
  mmSKRIPTE0009590_Il1f8_1
  gRNA
tagcagcgggtgaacaactg

SEQ ID NO: 138812 - DNA, 20 bp, Artificial Sequence
  mmSKRIPTE0009591_Il1f8_2
  gRNA
atctccttctaatctcaccg

SEQ ID NO: 138813 - DNA, 20 bp, Artificial Sequence
  mmSKRIPTE0009592_Il1f8_3
  gRNA
cacagttacatggctaacgt

SEQ ID NO: 138814 - DNA, 20 bp, Artificial Sequence
  mmSKRIPTE0009593_Il1f8_4
  gRNA
gggagccacacatataggtg

SEQ ID NO: 138815 - DNA, 20 bp, Artificial Sequence
  mmSKRIPTE0009594_Il1f8_5
  gRNA
agttatgacagcaggcaatg

SEQ ID NO: 138816 - DNA, 20 bp, Artificial Sequence
  mmSKRIPTE0009595_Il1f8_6
  gRNA
ttatccctccaaatcagggc

SEQ ID NO: 138817 - DNA, 20 bp, Artificial Sequence
  mmSKRIPTE0009596_Il1f8_7
  gRNA
tcactgatagaagtaagtca

SEQ ID NO: 138818 - DNA, 20 bp, Artificial Sequence
  mmSKRIPTE0009597_Il1f8_8
  gRNA
gtaaatcacctaagacagaa

SEQ ID NO: 138819 - DNA, 20 bp, Artificial Sequence
  mmSKRIPTE0009598_Il1f8_9
  gRNA
gactggacttagtagctgga

SEQ ID NO: 138820 - DNA, 20 bp, Artificial Sequence
  mmSKRIPTE0009599_Arf6_1
  gRNA
tctggcggcattactacacc

SEQ ID NO: 138821 - DNA, 20 bp, Artificial Sequence
  mmSKRIPTE0009600_Arf6_2
  gRNA
ctaccacgaagatcagaccc

SEQ ID NO: 138822 - DNA, 20 bp, Artificial Sequence
  mmSKRIPTE0009601_Arf6_3
  gRNA
cttgtgacttccagcaaacg

SEQ ID NO: 138823 - DNA, 20 bp, Artificial Sequence
  mmSKRIPTE0009602_Arf6_4
  gRNA
gtcaggtcatggatcctcgc

SEQ ID NO: 138824 - DNA, 20 bp, Artificial Sequence
  mmSKRIPTE0009603_Arf6_5
  gRNA
tagcaccttccccatcgcgt

SEQ ID NO: 138825 - DNA, 20 bp, Artificial Sequence
  mmSKRIPTE0009604_Arf6_6
  gRNA
gggagaagggagttaccgcc

SEQ ID NO: 138826 - DNA, 20 bp, Artificial Sequence
  mmSKRIPTE0009605_Arf6_7
  gRNA
ctcgcctcgcttgagcaggg

SEQ ID NO: 138827 - DNA, 20 bp, Artificial Sequence
  mmSKRIPTE0009606_Arf6_8
  gRNA
tgctaaagttagcgctaagg

SEQ ID NO: 138828 - DNA, 20 bp, Artificial Sequence
  mmSKRIPTE0009607_Arf6_9
  gRNA
catcctaacgcaaagccaag

SEQ ID NO: 138829 - DNA, 20 bp, Artificial Sequence
  mmSKRIPTE0009608_Tkfc_1
  gRNA
gtgtggcaaatggcctcact

SEQ ID NO: 138830 - DNA, 20 bp, Artificial Sequence
  mmSKRIPTE0009609_Tkfc_2
  gRNA
ggtacctcacactagcactg

SEQ ID NO: 138831 - DNA, 20 bp, Artificial Sequence
  mmSKRIPTE0009610_Tkfc_3
  gRNA
caccaccctcatcggactgg

SEQ ID NO: 138832 - DNA, 20 bp, Artificial Sequence
  mmSKRIPTE0009611_Tkfc_4
  gRNA
agtcaggaccgtccacccgg

SEQ ID NO: 138833 - DNA, 20 bp, Artificial Sequence
  mmSKRIPTE0009612_Tkfc_5
  gRNA
ggtctccaggatggaacgtg

SEQ ID NO: 138834 - DNA, 20 bp, Artificial Sequence
  mmSKRIPTE0009613_Tkfc_6
  gRNA
tctaggtctgttatccctgg

SEQ ID NO: 138835 - DNA, 20 bp, Artificial Sequence
  mmSKRIPTE0009614_Tkfc_7
  gRNA
ccatgctactgttcctacag

SEQ ID NO: 138836 - DNA, 20 bp, Artificial Sequence
  mmSKRIPTE0009615_Tkfc_8
  gRNA
gggtataggaggccttccag

SEQ ID NO: 138837 - DNA, 20 bp, Artificial Sequence
  mmSKRIPTE0009616_Tkfc_9
  gRNA
gagtctagagaccacctgag

SEQ ID NO: 138838 - DNA, 20 bp, Artificial Sequence
  mmSKRIPTE0009617_Ighv8-4_1
  gRNA
gaaagtgcaagtaagtctga

SEQ ID NO: 138839 - DNA, 20 bp, Artificial Sequence
  mmSKRIPTE0009618_Ighv8-4_2
  gRNA
tgagtgtcagggattcctaa

SEQ ID NO: 138840 - DNA, 20 bp, Artificial Sequence
  mmSKRIPTE0009619_Ighv8-4_3
  gRNA
gaacatctgaaaagtgacct

SEQ ID NO: 138841 - DNA, 20 bp, Artificial Sequence
  mmSKRIPTE0009620_Ighv8-4_4
  gRNA
attcctgaatatcatcactg

SEQ ID NO: 138842 - DNA, 20 bp, Artificial Sequence
  mmSKRIPTE0009621_Ighv8-4_5
  gRNA
tctttagagatgggttgtag

SEQ ID NO: 138843 - DNA, 20 bp, Artificial Sequence
  mmSKRIPTE0009622_Ighv8-4_6
  gRNA
tgaagacataagcctgtcca

SEQ ID NO: 138844 - DNA, 20 bp, Artificial Sequence
  mmSKRIPTE0009623_Ighv8-4_7
  gRNA
agactgtttcagagtaatct

SEQ ID NO: 138845 - DNA, 20 bp, Artificial Sequence
  mmSKRIPTE0009624_Ighv8-4_8
  gRNA
gtggctggcaaccatttggt

SEQ ID NO: 138846 - DNA, 20 bp, Artificial Sequence
  mmSKRIPTE0009625_Ighv8-4_9
  gRNA
ggtaagtttagaatagagtg

SEQ ID NO: 138847 - DNA, 20 bp, Artificial Sequence
  mmSKRIPTE0009626_Fcer1a_1
  gRNA
gtaacgcaaggtacgttcca

SEQ ID NO: 138848 - DNA, 20 bp, Artificial Sequence
  mmSKRIPTE0009627_Fcer1a_2
  gRNA
tggcctctctaatggagacg

SEQ ID NO: 138849 - DNA, 20 bp, Artificial Sequence
  mmSKRIPTE0009628_Fcer1a_3
  gRNA
ggccaggcgataaacaagag

SEQ ID NO: 138850 - DNA, 20 bp, Artificial Sequence
  mmSKRIPTE0009629_Fcer1a_4
  gRNA
ccacaatggtaccgtctctg

SEQ ID NO: 138851 - DNA, 20 bp, Artificial Sequence
  mmSKRIPTE0009630_Fcer1a_5
  gRNA
tgtttgaagttagtacaaca

SEQ ID NO: 138852 - DNA, 20 bp, Artificial Sequence
  mmSKRIPTE0009631_Fcer1a_6
  gRNA
agtgccaccgttcaagacag

SEQ ID NO: 138853 - DNA, 20 bp, Artificial Sequence
  mmSKRIPTE0009632_Fcer1a_7
  gRNA
gctctctagaccactgtaga

SEQ ID NO: 138854 - DNA, 20 bp, Artificial Sequence
  mmSKRIPTE0009633_Fcer1a_8
  gRNA
aaaatgtccagatacactgg

SEQ ID NO: 138855 - DNA, 20 bp, Artificial Sequence
  mmSKRIPTE0009634_Fcer1a_9
  gRNA
gagctataggaaaacacgat

SEQ ID NO: 138856 - DNA, 20 bp, Artificial Sequence
  mmSKRIPTE0009635_Ighd_1
  gRNA
catgatacacgagtgttgga

SEQ ID NO: 138857 - DNA, 20 bp, Artificial Sequence
  mmSKRIPTE0009636_Ighd_2
  gRNA
aagtgataagtattagcggg

SEQ ID NO: 138858 - DNA, 20 bp, Artificial Sequence
  mmSKRIPTE0009637_Ighd_3
  gRNA
agagccgtgaagtcatacag

SEQ ID NO: 138859 - DNA, 20 bp, Artificial Sequence
  mmSKRIPTE0009638_Ighd_4
  gRNA
tgagagatcagagtattccg

SEQ ID NO: 138860 - DNA, 20 bp, Artificial Sequence
  mmSKRIPTE0009639_Ighd_5
  gRNA
acccatcggtacttctggag

SEQ ID NO: 138861 - DNA, 20 bp, Artificial Sequence
  mmSKRIPTE0009640_Ighd_6
  gRNA
tatccctggaccatgcagaa

SEQ ID NO: 138862 - DNA, 20 bp, Artificial Sequence
  mmSKRIPTE0009641_Ighd_7
  gRNA
tagaggaggagaacggcctg

SEQ ID NO: 138863 - DNA, 20 bp, Artificial Sequence
  mmSKRIPTE0009642_Ighd_8
  gRNA
gcaaaggcactagctatgca

SEQ ID NO: 138864 - DNA, 20 bp, Artificial Sequence
  mmSKRIPTE0009643_Ighd_9
  gRNA
ttcgtcaccttcatcaaggt

SEQ ID NO: 138865 - DNA, 20 bp, Artificial Sequence
  mmSKRIPTE0009644_Cav1_1
  gRNA
tttctgacaccagacccgca

SEQ ID NO: 138866 - DNA, 20 bp, Artificial Sequence
  mmSKRIPTE0009645_Cav1_2
  gRNA
gctctctgcctggtaccgag

SEQ ID NO: 138867 - DNA, 20 bp, Artificial Sequence
  mmSKRIPTE0009646_Cav1_3
  gRNA
gcactcaggtggactaaacg

SEQ ID NO: 138868 - DNA, 20 bp, Artificial Sequence
  mmSKRIPTE0009647_Cav1_4
  gRNA
agtcagggccgagagccgtg

SEQ ID NO: 138869 - DNA, 20 bp, Artificial Sequence
  mmSKRIPTE0009648_Cav1_5
  gRNA
tttgctagcttcaacctcga

SEQ ID NO: 138870 - DNA, 20 bp, Artificial Sequence
  mmSKRIPTE0009649_Cav1_6
  gRNA
actgttcccatccgggaaca

SEQ ID NO: 138871 - DNA, 20 bp, Artificial Sequence
  mmSKRIPTE0009650_Cav1_7
  gRNA
agtgtatgacgcgcacacca

SEQ ID NO: 138872 - DNA, 20 bp, Artificial Sequence
  mmSKRIPTE0009651_Cav1_8
  gRNA
aagcttgggagagtacactg

SEQ ID NO: 138873 - DNA, 20 bp, Artificial Sequence
  mmSKRIPTE0009652_Cav1_9
  gRNA
aaagcacgggtgggtcaccg

SEQ ID NO: 138874 - DNA, 20 bp, Artificial Sequence
  mmSKRIPTE0009653_Ccl25_1
  gRNA
tggctgcataaagtgcctca

SEQ ID NO: 138875 - DNA, 20 bp, Artificial Sequence
  mmSKRIPTE0009654_Ccl25_2
  gRNA
accccaacagtacaagcgtg

SEQ ID NO: 138876 - DNA, 20 bp, Artificial Sequence
  mmSKRIPTE0009655_Ccl25_3
  gRNA
ggtaaagactcttgagcacg

SEQ ID NO: 138877 - DNA, 20 bp, Artificial Sequence
  mmSKRIPTE0009656_Ccl25_4
  gRNA
aggcaatacacgctacaagc

SEQ ID NO: 138878 - DNA, 20 bp, Artificial Sequence
  mmSKRIPTE0009657_Ccl25_5
  gRNA
gctgcaacctacgtgctgtg

SEQ ID NO: 138879 - DNA, 20 bp, Artificial Sequence
  mmSKRIPTE0009658_Ccl25_6
  gRNA
gcggaagtagaatctacaga

SEQ ID NO: 138880 - DNA, 20 bp, Artificial Sequence
  mmSKRIPTE0009659_Ccl25_7
  gRNA
aaagcaatatgcccaaaccg

SEQ ID NO: 138881 - DNA, 20 bp, Artificial Sequence
  mmSKRIPTE0009660_Ccl25_8
  gRNA
gagtgccaagttaggacatg

SEQ ID NO: 138882 - DNA, 20 bp, Artificial Sequence
  mmSKRIPTE0009661_Ccl25_9
  gRNA
taaccttcactatgaaactg

SEQ ID NO: 138883 - DNA, 20 bp, Artificial Sequence
  mmSKRIPTE0009662_Ccl8_1
  gRNA
caacaatatccagtgcccca

SEQ ID NO: 138884 - DNA, 20 bp, Artificial Sequence
  mmSKRIPTE0009663_Ccl8_2
  gRNA
ctccctatgtgggtaaggcg

SEQ ID NO: 138885 - DNA, 20 bp, Artificial Sequence
  mmSKRIPTE0009664_Ccl8_3
  gRNA
ccactccatctctagtaaca

SEQ ID NO: 138886 - DNA, 20 bp, Artificial Sequence
  mmSKRIPTE0009665_Ccl8_4
  gRNA
ccctcatcttcccttatgag

SEQ ID NO: 138887 - DNA, 20 bp, Artificial Sequence
  mmSKRIPTE0009666_Ccl8_5
  gRNA
agaccctagatacaaaactt

SEQ ID NO: 138888 - DNA, 20 bp, Artificial Sequence
  mmSKRIPTE0009667_Ccl8_6
  gRNA
aatggggtctgtcgagctgt

SEQ ID NO: 138889 - DNA, 20 bp, Artificial Sequence
  mmSKRIPTE0009668_Ccl8_7
  gRNA
ctctgcctggagaagattag

SEQ ID NO: 138890 - DNA, 20 bp, Artificial Sequence
  mmSKRIPTE0009669_Ccl8_8
  gRNA
atctaactctgctagtctgg

SEQ ID NO: 138891 - DNA, 20 bp, Artificial Sequence
  mmSKRIPTE0009670_Ccl8_9
  gRNA
atgatttcccggcagctgga

SEQ ID NO: 138892 - DNA, 20 bp, Artificial Sequence
  mmSKRIPTE0009671_H2-D1_1
  gRNA
ctcggactgacagttaacgt

SEQ ID NO: 138893 - DNA, 20 bp, Artificial Sequence
  mmSKRIPTE0009672_H2-D1_2
  gRNA
cctcctcaccaaaccccggg

SEQ ID NO: 138894 - DNA, 20 bp, Artificial Sequence
  mmSKRIPTE0009673_H2-D1_3
  gRNA
ccgggacactgatgacgcgc

SEQ ID NO: 138895 - DNA, 20 bp, Artificial Sequence
  mmSKRIPTE0009674_H2-D1_4
  gRNA
agatgtaccggggctcctcg

SEQ ID NO: 138896 - DNA, 20 bp, Artificial Sequence
  mmSKRIPTE0009675_H2-D1_5
  gRNA
tctgtgatggggccacacct

SEQ ID NO: 138897 - DNA, 20 bp, Artificial Sequence
  mmSKRIPTE0009676_H2-D1_6
  gRNA
aaaatggactgagcccacct

SEQ ID NO: 138898 - DNA, 20 bp, Artificial Sequence
  mmSKRIPTE0009677_H2-D1_7
  gRNA
ggagccaatcagcgtcgccg

SEQ ID NO: 138899 - DNA, 20 bp, Artificial Sequence
  mmSKRIPTE0009678_H2-D1_8
  gRNA
cgacgcaagtgggagcagag

SEQ ID NO: 138900 - DNA, 20 bp, Artificial Sequence
  mmSKRIPTE0009679_H2-D1_9
  gRNA
cctccagagaaatcttctag

SEQ ID NO: 138901 - DNA, 20 bp, Artificial Sequence
  mmSKRIPTE0009680_H2-M10.4_1
  gRNA
aagacgaactcttatataca

SEQ ID NO: 138902 - DNA, 20 bp, Artificial Sequence
  mmSKRIPTE0009681_H2-M10.4_2
  gRNA
gcttactgggccagaccgtg

SEQ ID NO: 138903 - DNA, 20 bp, Artificial Sequence
  mmSKRIPTE0009682_H2-M10.4_3
  gRNA
acagcagatcagagactgcg

SEQ ID NO: 138904 - DNA, 20 bp, Artificial Sequence
  mmSKRIPTE0009683_H2-M10.4_4
  gRNA
tttaatccagaccggacgca

SEQ ID NO: 138905 - DNA, 20 bp, Artificial Sequence
  mmSKRIPTE0009684_H2-M10.4_5
  gRNA
tacaggctgttacctgagta

SEQ ID NO: 138906 - DNA, 20 bp, Artificial Sequence
  mmSKRIPTE0009685_H2-M10.4_6
  gRNA
cacccaccttcacaatactg

SEQ ID NO: 138907 - DNA, 20 bp, Artificial Sequence
  mmSKRIPTE0009686_H2-M10.4_7
  gRNA
gctgtacaactggtgccaag

SEQ ID NO: 138908 - DNA, 20 bp, Artificial Sequence
  mmSKRIPTE0009687_H2-M10.4_8
  gRNA
gctccctacaaacctactct

SEQ ID NO: 138909 - DNA, 20 bp, Artificial Sequence
  mmSKRIPTE0009688_H2-M10.4_9
  gRNA
tgagcccgtagtgaccacca

SEQ ID NO: 138910 - DNA, 20 bp, Artificial Sequence
  mmSKRIPTE0009689_Pde4b_1
  gRNA
tgaaacccggaattgtacga

SEQ ID NO: 138911 - DNA, 20 bp, Artificial Sequence
  mmSKRIPTE0009690_Pde4b_2
  gRNA
gcatacatgatgcacgtaag

SEQ ID NO: 138912 - DNA, 20 bp, Artificial Sequence
  mmSKRIPTE0009691_Pde4b_3
  gRNA
ctcacgcttcggagtcaaca

SEQ ID NO: 138913 - DNA, 20 bp, Artificial Sequence
  mmSKRIPTE0009692_Pde4b_4
  gRNA
tgtgtccaccaaatctgatg

SEQ ID NO: 138914 - DNA, 20 bp, Artificial Sequence
  mmSKRIPTE0009693_Pde4b_5
  gRNA
ctcccaactagagtaaaatg

SEQ ID NO: 138915 - DNA, 20 bp, Artificial Sequence
  mmSKRIPTE0009694_Pde4b_6
  gRNA
gggagtaccacccgtctgga

SEQ ID NO: 138916 - DNA, 20 bp, Artificial Sequence
  mmSKRIPTE0009695_Pde4b_7
  gRNA
gaatgctattgcatgcacgc

SEQ ID NO: 138917 - DNA, 20 bp, Artificial Sequence
  mmSKRIPTE0009696_Pde4b_8
  gRNA
atggaccgatcgtatcatgg

SEQ ID NO: 138918 - DNA, 20 bp, Artificial Sequence
  mmSKRIPTE0009697_Pde4b_9
  gRNA
gggccttaacatcttcaatg

SEQ ID NO: 138919 - DNA, 20 bp, Artificial Sequence
  mmSKRIPTE0009698_Mir301_1
  gRNA
aaaggtgtgcaacctgctcg

SEQ ID NO: 138920 - DNA, 20 bp, Artificial Sequence
  mmSKRIPTE0009699_Mir301_2
  gRNA
ttcctgctcactcctgctaa

SEQ ID NO: 138921 - DNA, 20 bp, Artificial Sequence
  mmSKRIPTE0009700_Mir301_3
  gRNA
ggtttctataactttcagtg

SEQ ID NO: 138922 - DNA, 20 bp, Artificial Sequence
  mmSKRIPTE0009701_Mir301_4
  gRNA
tactgtacgctgtgaagtaa

SEQ ID NO: 138923 - DNA, 20 bp, Artificial Sequence
  mmSKRIPTE0009702_Mir301_5
  gRNA
acaaaaaccaattatcactt

SEQ ID NO: 138924 - DNA, 20 bp, Artificial Sequence
  mmSKRIPTE0009703_Ighv1-12_1
  gRNA
taccagttacaatatgcact

SEQ ID NO: 138925 - DNA, 20 bp, Artificial Sequence
  mmSKRIPTE0009704_Ighv1-12_2
  gRNA
agactgctgtagataagcct

SEQ ID NO: 138926 - DNA, 20 bp, Artificial Sequence
  mmSKRIPTE0009705_Ighv1-12_3
  gRNA
aaagatcctgctgaatccca

SEQ ID NO: 138927 - DNA, 20 bp, Artificial Sequence
  mmSKRIPTE0009706_Ighv1-12_4
  gRNA
gtaaagcagacacctagaca

SEQ ID NO: 138928 - DNA, 20 bp, Artificial Sequence
  mmSKRIPTE0009707_Ighv1-12_5
  gRNA
tgggagtggacacctataga

SEQ ID NO: 138929 - DNA, 20 bp, Artificial Sequence
  mmSKRIPTE0009708_Ighv1-12_6
  gRNA
ctatttctaagtaaatctac

SEQ ID NO: 138930 - DNA, 20 bp, Artificial Sequence
  mmSKRIPTE0009709_Ighv1-12_7
  gRNA
caccagttccaaatattaag

SEQ ID NO: 138931 - DNA, 20 bp, Artificial Sequence
  mmSKRIPTE0009710_Ighv1-12_8
  gRNA
tatggaatgcagattattga

SEQ ID NO: 138932 - DNA, 20 bp, Artificial Sequence
  mmSKRIPTE0009711_Tslp_1
  gRNA
acagagaaatgacggtactc

SEQ ID NO: 138933 - DNA, 20 bp, Artificial Sequence
  mmSKRIPTE0009712_Tslp_2
  gRNA
taaaagtggggctttaagtg

SEQ ID NO: 138934 - DNA, 20 bp, Artificial Sequence
  mmSKRIPTE0009713_Tslp_3
  gRNA
gggcagtcactgccatgatg

SEQ ID NO: 138935 - DNA, 20 bp, Artificial Sequence
  mmSKRIPTE0009714_Tslp_4
  gRNA
gcctttgcaatgaatgactg

SEQ ID NO: 138936 - DNA, 20 bp, Artificial Sequence
  mmSKRIPTE0009715_Tslp_5
  gRNA
ttattctggagattgcatga

SEQ ID NO: 138937 - DNA, 20 bp, Artificial Sequence
  mmSKRIPTE0009716_Tslp_6
  gRNA
atatatctcgtagatgtgca

SEQ ID NO: 138938 - DNA, 20 bp, Artificial Sequence
  mmSKRIPTE0009717_Tslp_7
  gRNA
ggaaaacggaatcaacccac

SEQ ID NO: 138939 - DNA, 20 bp, Artificial Sequence
  mmSKRIPTE0009718_Tslp_8
  gRNA
gattgcatgtgcttctccag

SEQ ID NO: 138940 - DNA, 20 bp, Artificial Sequence
  mmSKRIPTE0009719_Tslp_9
  gRNA
cctgcacacaccttactcta

SEQ ID NO: 138941 - DNA, 20 bp, Artificial Sequence
  mmSKRIPTE0009720_Mecom_1
  gRNA
acattcttccagtagccgag

SEQ ID NO: 138942 - DNA, 20 bp, Artificial Sequence
  mmSKRIPTE0009721_Mecom_2
  gRNA
tcaatgctcattaggtcacg

SEQ ID NO: 138943 - DNA, 20 bp, Artificial Sequence
  mmSKRIPTE0009722_Mecom_3
  gRNA
gagatcgaatgtgtcgctga

SEQ ID NO: 138944 - DNA, 20 bp, Artificial Sequence
  mmSKRIPTE0009723_Mecom_4
  gRNA
agctgtccatgacacgatag

SEQ ID NO: 138945 - DNA, 20 bp, Artificial Sequence
  mmSKRIPTE0009724_Mecom_5
  gRNA
gattaaacctcataatcaca

SEQ ID NO: 138946 - DNA, 20 bp, Artificial Sequence
  mmSKRIPTE0009725_Mecom_6
  gRNA
agtttgacaagtttgctcgg

SEQ ID NO: 138947 - DNA, 20 bp, Artificial Sequence
  mmSKRIPTE0009726_Mecom_7
  gRNA
ctgtttgaggcctgacgaag

SEQ ID NO: 138948 - DNA, 20 bp, Artificial Sequence
  mmSKRIPTE0009727_Mecom_8
  gRNA
gcgcacatgtcgctgcaggt

SEQ ID NO: 138949 - DNA, 20 bp, Artificial Sequence
  mmSKRIPTE0009728_Mecom_9
  gRNA
gcatgcgcttatgacgacaa

SEQ ID NO: 138950 - DNA, 20 bp, Artificial Sequence
  mmSKRIPTE0009729_S100a9_1
  gRNA
caacctaggagggcttcaag

SEQ ID NO: 138951 - DNA, 20 bp, Artificial Sequence
  mmSKRIPTE0009730_S100a9_2
  gRNA
aaaatgaagcttacttacca

SEQ ID NO: 138952 - DNA, 20 bp, Artificial Sequence
  mmSKRIPTE0009731_S100a9_3
  gRNA
aatgtgtggtgccctatttg

SEQ ID NO: 138953 - DNA, 20 bp, Artificial Sequence
  mmSKRIPTE0009732_S100a9_4
  gRNA
ctgttaggcaagataaggag

SEQ ID NO: 138954 - DNA, 20 bp, Artificial Sequence
  mmSKRIPTE0009733_S100a9_5
  gRNA
agaacaaattctagcaccgg

SEQ ID NO: 138955 - DNA, 20 bp, Artificial Sequence
  mmSKRIPTE0009734_S100a9_6
  gRNA
tgcatgagaacaacccacgt

SEQ ID NO: 138956 - DNA, 20 bp, Artificial Sequence
  mmSKRIPTE0009735_S100a9_7
  gRNA
ttagatacatggttatctcg

SEQ ID NO: 138957 - DNA, 20 bp, Artificial Sequence
  mmSKRIPTE0009736_S100a9_8
  gRNA
cttcctagagtattgatgga

SEQ ID NO: 138958 - DNA, 20 bp, Artificial Sequence
  mmSKRIPTE0009737_S100a9_9
  gRNA
caaggatagagacacggtga

SEQ ID NO: 138959 - DNA, 20 bp, Artificial Sequence
  mmSKRIPTE0009738_Raet1a_1
  gRNA
gatgaagtgaagtgcttcgt

SEQ ID NO: 138960 - DNA, 20 bp, Artificial Sequence
  mmSKRIPTE0009739_Raet1a_2
  gRNA
aatccctctggaaacaacga

SEQ ID NO: 138961 - DNA, 20 bp, Artificial Sequence
  mmSKRIPTE0009740_Raet1a_3
  gRNA
ctggctggagaaccacccgg

SEQ ID NO: 138962 - DNA, 20 bp, Artificial Sequence
  mmSKRIPTE0009741_Raet1a_4
  gRNA
tcagtctacatagtgttgga

SEQ ID NO: 138963 - DNA, 20 bp, Artificial Sequence
  mmSKRIPTE0009742_Raet1a_5
  gRNA
gaggttactcacaggatttg

SEQ ID NO: 138964 - DNA, 20 bp, Artificial Sequence
  mmSKRIPTE0009743_Raet1a_6
  gRNA
acagccttcggaagcaagcg

SEQ ID NO: 138965 - DNA, 20 bp, Artificial Sequence
  mmSKRIPTE0009744_Raet1a_7
  gRNA
ctggattcttacataaacag

SEQ ID NO: 138966 - DNA, 20 bp, Artificial Sequence
  mmSKRIPTE0009745_Raet1a_8
  gRNA
gaactcaccatctagcccgt

SEQ ID NO: 138967 - DNA, 20 bp, Artificial Sequence
  mmSKRIPTE0009746_Raet1a_9
  gRNA
tctacacagagattatgagc

SEQ ID NO: 138968 - DNA, 20 bp, Artificial Sequence
  mmSKRIPTE0009747_Ighv5-17_1
  gRNA
ctgtcagagctacagactcg

SEQ ID NO: 138969 - DNA, 20 bp, Artificial Sequence
  mmSKRIPTE0009748_Ighv5-17_2
  gRNA
tagagagaattcctttagcg

SEQ ID NO: 138970 - DNA, 20 bp, Artificial Sequence
  mmSKRIPTE0009749_Ighv5-17_3
  gRNA
cagtgactatggaatgcact

SEQ ID NO: 138971 - DNA, 20 bp, Artificial Sequence
  mmSKRIPTE0009750_Ighv5-17_4
  gRNA
ttacagtgcttgactatctg

SEQ ID NO: 138972 - DNA, 20 bp, Artificial Sequence
  mmSKRIPTE0009751_Ighv5-17_5
  gRNA
ggtcccaagtgacctgcagg

SEQ ID NO: 138973 - DNA, 20 bp, Artificial Sequence
  mmSKRIPTE0009752_Ighv5-17_6
  gRNA
ggctgcaagtctcactaact

SEQ ID NO: 138974 - DNA, 20 bp, Artificial Sequence
  mmSKRIPTE0009753_Ighv5-17_7
  gRNA
gatgtcttacatctactatg

SEQ ID NO: 138975 - DNA, 20 bp, Artificial Sequence
  mmSKRIPTE0009754_Ighv5-17_8
  gRNA
tctccctgttgtgtgcacat

SEQ ID NO: 138976 - DNA, 20 bp, Artificial Sequence
  mmSKRIPTE0009755_Ighv5-17_9
  gRNA
aaggaaaactaaattgagcc

SEQ ID NO: 138977 - DNA, 20 bp, Artificial Sequence
  mmSKRIPTE0009756_Ighv11-2_1
  gRNA
gcagatgagcaatgtgcgat

SEQ ID NO: 138978 - DNA, 20 bp, Artificial Sequence
  mmSKRIPTE0009757_Ighv11-2_2
  gRNA
gcacagtccacgcagaacag

SEQ ID NO: 138979 - DNA, 20 bp, Artificial Sequence
  mmSKRIPTE0009758_Ighv11-2_3
  gRNA
gtggactgtgcaccccctag

SEQ ID NO: 138980 - DNA, 20 bp, Artificial Sequence
  mmSKRIPTE0009759_Ighv11-2_4
  gRNA
ggtttatgtctagtttcaca

SEQ ID NO: 138981 - DNA, 20 bp, Artificial Sequence
  mmSKRIPTE0009760_Ighv11-2_5
  gRNA
gtgaatcgatcctttatgga

SEQ ID NO: 138982 - DNA, 20 bp, Artificial Sequence
  mmSKRIPTE0009761_Ighv11-2_6
  gRNA
gatatatagtgggagacaag

SEQ ID NO: 138983 - DNA, 20 bp, Artificial Sequence
  mmSKRIPTE0009762_Ighv11-2_7
  gRNA
gacatgaatatgaggaacaa

SEQ ID NO: 138984 - DNA, 20 bp, Artificial Sequence
  mmSKRIPTE0009763_Ighv11-2_8
  gRNA
ctcttactcacttctcaaca

SEQ ID NO: 138985 - DNA, 20 bp, Artificial Sequence
  mmSKRIPTE0009764_Ighv11-2_9
  gRNA
gcagaacagtggttcagacc

SEQ ID NO: 138986 - DNA, 20 bp, Artificial Sequence
  mmSKRIPTE0009765_Ppp1r14b_1
  gRNA
agcggcgagtgcaagaccgg

SEQ ID NO: 138987 - DNA, 20 bp, Artificial Sequence
  mmSKRIPTE0009766_Ppp1r14b_2
  gRNA
gctagggtcaaggtaagctg

SEQ ID NO: 138988 - DNA, 20 bp, Artificial Sequence
  mmSKRIPTE0009767_Ppp1r14b_3
  gRNA
agaaggcccaggatcacctg

SEQ ID NO: 138989 - DNA, 20 bp, Artificial Sequence
  mmSKRIPTE0009768_Ppp1r14b_4
  gRNA
attgctattccaagcagctg

SEQ ID NO: 138990 - DNA, 20 bp, Artificial Sequence
  mmSKRIPTE0009769_Ppp1r14b_5
  gRNA
ccctaaaatcggccctaagt

SEQ ID NO: 138991 - DNA, 20 bp, Artificial Sequence
  mmSKRIPTE0009770_Ppp1r14b_6
  gRNA
tagggccaagcctccccaag

SEQ ID NO: 138992 - DNA, 20 bp, Artificial Sequence
  mmSKRIPTE0009771_Ppp1r14b_7
  gRNA
gcagcttatcatcgggatcc

SEQ ID NO: 138993 - DNA, 20 bp, Artificial Sequence
  mmSKRIPTE0009772_Ppp1r14b_8
  gRNA
gcagtaccacgaaggacgca

SEQ ID NO: 138994 - DNA, 20 bp, Artificial Sequence
  mmSKRIPTE0009773_Ppp1r14b_9
  gRNA
ctcctgaaaggggatagggg

SEQ ID NO: 138995 - DNA, 20 bp, Artificial Sequence
  mmSKRIPTE0009774_Trbc1_1
  gRNA
aacagcatcctatcaacaag

SEQ ID NO: 138996 - DNA, 20 bp, Artificial Sequence
  mmSKRIPTE0009775_Trbc1_2
  gRNA
tgaagattaagccaatctag

SEQ ID NO: 138997 - DNA, 20 bp, Artificial Sequence
  mmSKRIPTE0009776_Trbc1_3
  gRNA
taggcctcttccagaagtag

SEQ ID NO: 138998 - DNA, 20 bp, Artificial Sequence
  mmSKRIPTE0009777_Trbc1_4
  gRNA
actgtagtggatagctatag

SEQ ID NO: 138999 - DNA, 20 bp, Artificial Sequence
  mmSKRIPTE0009778_Trbc1_5
  gRNA
tctacagtcataatcatgag

SEQ ID NO: 139000 - DNA, 20 bp, Artificial Sequence
  mmSKRIPTE0009779_Trbc1_6
  gRNA
acccaggcatttacaaccag

SEQ ID NO: 139001 - DNA, 20 bp, Artificial Sequence
  mmSKRIPTE0009780_Trbc1_7
  gRNA
ggcagatggagcttatgggg

SEQ ID NO: 139002 - DNA, 20 bp, Artificial Sequence
  mmSKRIPTE0009781_Trbc1_8
  gRNA
ctggggccgagcaggtaagt

SEQ ID NO: 139003 - DNA, 20 bp, Artificial Sequence
  mmSKRIPTE0009782_Trbc1_9
  gRNA
gacaagcacagcatacaggg

SEQ ID NO: 139004 - DNA, 20 bp, Artificial Sequence
  mmSKRIPTE0009783_Il15_1
  gRNA
aggtcttcactcttcagcgt

SEQ ID NO: 139005 - DNA, 20 bp, Artificial Sequence
  mmSKRIPTE0009784_Il15_2
  gRNA
tggtggtggtggatcaacaa

SEQ ID NO: 139006 - DNA, 20 bp, Artificial Sequence
  mmSKRIPTE0009785_Il15_3
  gRNA
gacgtgcaaatccttaactg

SEQ ID NO: 139007 - DNA, 20 bp, Artificial Sequence
  mmSKRIPTE0009786_Il15_4
  gRNA
gaaacacaagtagcacgaga

SEQ ID NO: 139008 - DNA, 20 bp, Artificial Sequence
  mmSKRIPTE0009787_Il15_5
  gRNA
tgtaggtctccctaaaacag

SEQ ID NO: 139009 - DNA, 20 bp, Artificial Sequence
  mmSKRIPTE0009788_Il15_6
  gRNA
tcttaaggacctcaccagca

SEQ ID NO: 139010 - DNA, 20 bp, Artificial Sequence
  mmSKRIPTE0009789_Il15_7
  gRNA
cagagggccatgtgtcaagg

SEQ ID NO: 139011 - DNA, 20 bp, Artificial Sequence
  mmSKRIPTE0009790_Il15_8
  gRNA
gagagtatggcacataacat

SEQ ID NO: 139012 - DNA, 20 bp, Artificial Sequence
  mmSKRIPTE0009791_Il15_9
  gRNA
ggggttgggtattcgtacgt

SEQ ID NO: 139013 - DNA, 20 bp, Artificial Sequence
  mmSKRIPTE0009792_H2-M1_1
  gRNA
tagccgagaaagattaactg

SEQ ID NO: 139014 - DNA, 20 bp, Artificial Sequence
  mmSKRIPTE0009793_H2-M1_2
  gRNA
tgtaaactcaggatacggat

SEQ ID NO: 139015 - DNA, 20 bp, Artificial Sequence
  mmSKRIPTE0009794_H2-M1_3
  gRNA
agcatggatgcagcacatag

SEQ ID NO: 139016 - DNA, 20 bp, Artificial Sequence
  mmSKRIPTE0009795_H2-M1_4
  gRNA
gaacttggatttgaacgaca

SEQ ID NO: 139017 - DNA, 20 bp, Artificial Sequence
  mmSKRIPTE0009796_H2-M1_5
  gRNA
agtagcgtctgtgcatgact

SEQ ID NO: 139018 - DNA, 20 bp, Artificial Sequence
  mmSKRIPTE0009797_H2-M1_6
  gRNA
ctcagccaattgtacaagga

SEQ ID NO: 139019 - DNA, 20 bp, Artificial Sequence
  mmSKRIPTE0009798_H2-M1_7
  gRNA
aaataacaagcctaagctgt

SEQ ID NO: 139020 - DNA, 20 bp, Artificial Sequence
  mmSKRIPTE0009799_H2-M1_8
  gRNA
atagcccctcatgatttacg

SEQ ID NO: 139021 - DNA, 20 bp, Artificial Sequence
  mmSKRIPTE0009800_H2-M1_9
  gRNA
atctccacactccacctagg

SEQ ID NO: 139022 - DNA, 20 bp, Artificial Sequence
  mmSKRIPTE0009801_Clec2g_1
  gRNA
actaaaaggcctcccaccgt

SEQ ID NO: 139023 - DNA, 20 bp, Artificial Sequence
  mmSKRIPTE0009802_Clec2g_2
  gRNA
gatcccattgccgctcaggt

SEQ ID NO: 139024 - DNA, 20 bp, Artificial Sequence
  mmSKRIPTE0009803_Clec2g_3
  gRNA
aatcccgtttgatagcactg

SEQ ID NO: 139025 - DNA, 20 bp, Artificial Sequence
  mmSKRIPTE0009804_Clec2g_4
  gRNA
atggctcccaacatgcctag

SEQ ID NO: 139026 - DNA, 20 bp, Artificial Sequence
  mmSKRIPTE0009805_Clec2g_5
  gRNA
gaaacatgtgcctacctgag

SEQ ID NO: 139027 - DNA, 20 bp, Artificial Sequence
  mmSKRIPTE0009806_Clec2g_6
  gRNA
gttatctctagagaaaggtg

SEQ ID NO: 139028 - DNA, 20 bp, Artificial Sequence
  mmSKRIPTE0009807_Clec2g_7
  gRNA
tatccgaggtatatagtgcc

SEQ ID NO: 139029 - DNA, 20 bp, Artificial Sequence
  mmSKRIPTE0009808_Clec2g_8
  gRNA
actgataggcaattgtcaag

SEQ ID NO: 139030 - DNA, 20 bp, Artificial Sequence
  mmSKRIPTE0009809_Clec2g_9
  gRNA
agcagtcagtctcttaacta

SEQ ID NO: 139031 - DNA, 20 bp, Artificial Sequence
  mmSKRIPTE0009810_Iigp1_1
  gRNA
cttgaggcctcatgagcgtg

SEQ ID NO: 139032 - DNA, 20 bp, Artificial Sequence
  mmSKRIPTE0009811_Iigp1_2
  gRNA
gctcaatgttgctgtcaccg

SEQ ID NO: 139033 - DNA, 20 bp, Artificial Sequence
  mmSKRIPTE0009812_Iigp1_3
  gRNA
acaccccaatatacccaatg

SEQ ID NO: 139034 - DNA, 20 bp, Artificial Sequence
  mmSKRIPTE0009813_Iigp1_4
  gRNA
ttggatagcacactcagaag

SEQ ID NO: 139035 - DNA, 20 bp, Artificial Sequence
  mmSKRIPTE0009814_Iigp1_5
  gRNA
gagaagggatgatattcact

SEQ ID NO: 139036 - DNA, 20 bp, Artificial Sequence
  mmSKRIPTE0009815_Iigp1_6
  gRNA
aagagtttactcaaagtgag

SEQ ID NO: 139037 - DNA, 20 bp, Artificial Sequence
  mmSKRIPTE0009816_Iigp1_7
  gRNA
tctgaagcagaggatttggc

SEQ ID NO: 139038 - DNA, 20 bp, Artificial Sequence
  mmSKRIPTE0009817_Iigp1_8
  gRNA
ggtcattatcaagaatcttg

SEQ ID NO: 139039 - DNA, 20 bp, Artificial Sequence
  mmSKRIPTE0009818_Iigp1_9
  gRNA
attctacttcgtgagaacca

SEQ ID NO: 139040 - DNA, 20 bp, Artificial Sequence
  mmSKRIPTE0009819_Gnas_1
  gRNA
cgacctaaggattaaccggg

SEQ ID NO: 139041 - DNA, 20 bp, Artificial Sequence
  mmSKRIPTE0009820_Gnas_2
  gRNA
ctcggactaaggcaagcgcg

SEQ ID NO: 139042 - DNA, 20 bp, Artificial Sequence
  mmSKRIPTE0009821_Gnas_3
  gRNA
cctcggcaacagtaagaccg

SEQ ID NO: 139043 - DNA, 20 bp, Artificial Sequence
  mmSKRIPTE0009822_Gnas_4
  gRNA
ccggagaagaaccagcaacg

SEQ ID NO: 139044 - DNA, 20 bp, Artificial Sequence
  mmSKRIPTE0009823_Gnas_5
  gRNA
tccagcctagaacatggacg

SEQ ID NO: 139045 - DNA, 20 bp, Artificial Sequence
  mmSKRIPTE0009824_Gnas_6
  gRNA
ctttaaaaggggcggcgaag

SEQ ID NO: 139046 - DNA, 20 bp, Artificial Sequence
  mmSKRIPTE0009825_Gnas_7
  gRNA
aaggagcaacagcgatgggt

SEQ ID NO: 139047 - DNA, 20 bp, Artificial Sequence
  mmSKRIPTE0009826_Gnas_8
  gRNA
tgagcgcgaatggagctgca

SEQ ID NO: 139048 - DNA, 20 bp, Artificial Sequence
  mmSKRIPTE0009827_Gnas_9
  gRNA
acttggcccgggtcacgcgt

SEQ ID NO: 139049 - DNA, 20 bp, Artificial Sequence
  mmSKRIPTE0009828_Gm3898_1
  gRNA
atagctatagtagctccgtt

SEQ ID NO: 139050 - DNA, 20 bp, Artificial Sequence
  mmSKRIPTE0009829_Gm3898_2
  gRNA
gagatgcacaatttgcaggg

SEQ ID NO: 139051 - DNA, 20 bp, Artificial Sequence
  mmSKRIPTE0009830_Gm3898_3
  gRNA
cttagtgagagctaacctca

SEQ ID NO: 139052 - DNA, 20 bp, Artificial Sequence
  mmSKRIPTE0009831_Gm3898_4
  gRNA
cagagtcgtgccgagaacga

SEQ ID NO: 139053 - DNA, 20 bp, Artificial Sequence
  mmSKRIPTE0009832_Gm3898_5
  gRNA
aaaagactccattatccccc

SEQ ID NO: 139054 - DNA, 20 bp, Artificial Sequence
  mmSKRIPTE0009833_Gm3898_6
  gRNA
aggtgggcctagggcaacac

SEQ ID NO: 139055 - DNA, 20 bp, Artificial Sequence
  mmSKRIPTE0009834_Gm3898_7
  gRNA
cggggctcttgtgacagtag

SEQ ID NO: 139056 - DNA, 20 bp, Artificial Sequence
  mmSKRIPTE0009835_Gm3898_8
  gRNA
gagtcagatgtcagacccgg

SEQ ID NO: 139057 - DNA, 20 bp, Artificial Sequence
  mmSKRIPTE0009836_Gm3898_9
  gRNA
agggacaggtccatcctgaa

SEQ ID NO: 139058 - DNA, 20 bp, Artificial Sequence
  mmSKRIPTE0009837_Ighv1-47_1
  gRNA
tcactacctatcctatagag

SEQ ID NO: 139059 - DNA, 20 bp, Artificial Sequence
  mmSKRIPTE0009838_Ighv1-47_2
  gRNA
tagagatccacgccattgtg

SEQ ID NO: 139060 - DNA, 20 bp, Artificial Sequence
  mmSKRIPTE0009839_Ighv1-47_3
  gRNA
tctataatcactgagtgcag

SEQ ID NO: 139061 - DNA, 20 bp, Artificial Sequence
  mmSKRIPTE0009840_Ighv1-47_4
  gRNA
tacctatagctgttgccact

SEQ ID NO: 139062 - DNA, 20 bp, Artificial Sequence
  mmSKRIPTE0009841_Ighv1-47_5
  gRNA
gtgtgtgtcaaaaaacctgg

SEQ ID NO: 139063 - DNA, 20 bp, Artificial Sequence
  mmSKRIPTE0009842_Ighv1-47_6
  gRNA
atcatggaaagagcctagag

SEQ ID NO: 139064 - DNA, 20 bp, Artificial Sequence
  mmSKRIPTE0009843_Ighv1-47_7
  gRNA
ctccaagtagactgtgctag

SEQ ID NO: 139065 - DNA, 20 bp, Artificial Sequence
  mmSKRIPTE0009844_Ighv1-47_8
  gRNA
cagagtcatcagatgttaat

SEQ ID NO: 139066 - DNA, 20 bp, Artificial Sequence
  mmSKRIPTE0009845_Ighv1-47_9
  gRNA
gtagatgtcacatgagtgta

SEQ ID NO: 139067 - DNA, 20 bp, Artificial Sequence
  mmSKRIPTE0009846_Ulbp1_1
  gRNA
gccccccataggaaagaaca

SEQ ID NO: 139068 - DNA, 20 bp, Artificial Sequence
  mmSKRIPTE0009847_Ulbp1_2
  gRNA
cacgcatagaataatcatca

SEQ ID NO: 139069 - DNA, 20 bp, Artificial Sequence
  mmSKRIPTE0009848_Ulbp1_3
  gRNA
gtgagttcctgagattctag

SEQ ID NO: 139070 - DNA, 20 bp, Artificial Sequence
  mmSKRIPTE0009849_Ulbp1_4
  gRNA
catttacgtacaaaaaaggt

SEQ ID NO: 139071 - DNA, 20 bp, Artificial Sequence
  mmSKRIPTE0009850_Ulbp1_5
  gRNA
caaatggcccaataaggctg

SEQ ID NO: 139072 - DNA, 20 bp, Artificial Sequence
  mmSKRIPTE0009851_Ulbp1_6
  gRNA
tctcgaattcatgatccagt

SEQ ID NO: 139073 - DNA, 20 bp, Artificial Sequence
  mmSKRIPTE0009852_Ulbp1_7
  gRNA
ttggtaaatagttctcacaa

SEQ ID NO: 139074 - DNA, 20 bp, Artificial Sequence
  mmSKRIPTE0009853_Ulbp1_8
  gRNA
aacaaggagcatcattccag

SEQ ID NO: 139075 - DNA, 20 bp, Artificial Sequence
  mmSKRIPTE0009854_Ulbp1_9
  gRNA
ttgccttgatcccccagcca

SEQ ID NO: 139076 - DNA, 20 bp, Artificial Sequence
  mmSKRIPTE0009855_Ighv1-5_1
  gRNA
ctccacaggggtctactcag

SEQ ID NO: 139077 - DNA, 20 bp, Artificial Sequence
  mmSKRIPTE0009856_Ighv1-5_2
  gRNA
acagggtctggaatggatag

SEQ ID NO: 139078 - DNA, 20 bp, Artificial Sequence
  mmSKRIPTE0009857_Ighv1-5_3
  gRNA
gtcagaaaacttggagtggt

SEQ ID NO: 139079 - DNA, 20 bp, Artificial Sequence
  mmSKRIPTE0009858_Ighv1-5_4
  gRNA
gctcagcagcctgacaaatg

SEQ ID NO: 139080 - DNA, 20 bp, Artificial Sequence
  mmSKRIPTE0009859_Ighv1-5_5
  gRNA
atcaacttctccaaataaag

SEQ ID NO: 139081 - DNA, 20 bp, Artificial Sequence
  mmSKRIPTE0009860_Ighv1-5_6
  gRNA
tctgtcggtaacttcaggta

SEQ ID NO: 139082 - DNA, 20 bp, Artificial Sequence
  mmSKRIPTE0009861_Ighv1-5_7
  gRNA
gctacacatttaccagctac

SEQ ID NO: 139083 - DNA, 20 bp, Artificial Sequence
  mmSKRIPTE0009862_Ighv1-5_8
  gRNA
ggatgtgactgcagtcagtt

SEQ ID NO: 139084 - DNA, 20 bp, Artificial Sequence
  mmSKRIPTE0009863_Ighv1-5_9
  gRNA
atcctctccagatttggaac

SEQ ID NO: 139085 - DNA, 20 bp, Artificial Sequence
  mmSKRIPTE0009864_H2-M11_1
  gRNA
gatgaagacctttgttaccg

SEQ ID NO: 139086 - DNA, 20 bp, Artificial Sequence
  mmSKRIPTE0009865_H2-M11_2
  gRNA
tatgcgttgattgttcccct

SEQ ID NO: 139087 - DNA, 20 bp, Artificial Sequence
  mmSKRIPTE0009866_H2-M11_3
  gRNA
ccgtttctgaaataccctcg

SEQ ID NO: 139088 - DNA, 20 bp, Artificial Sequence
  mmSKRIPTE0009867_H2-M11_4
  gRNA
atttaacagagatactgcaa

SEQ ID NO: 139089 - DNA, 20 bp, Artificial Sequence
  mmSKRIPTE0009868_H2-M11_5
  gRNA
agcaaatctaggttctggct

SEQ ID NO: 139090 - DNA, 20 bp, Artificial Sequence
  mmSKRIPTE0009869_H2-M11_6
  gRNA
taaatgtcatgtgaatcatg

SEQ ID NO: 139091 - DNA, 20 bp, Artificial Sequence
  mmSKRIPTE0009870_H2-M11_7
  gRNA
ttagatgttaaccccacaag

SEQ ID NO: 139092 - DNA, 20 bp, Artificial Sequence
  mmSKRIPTE0009871_H2-M11_8
  gRNA
tgaatgaggacctaagcact

SEQ ID NO: 139093 - DNA, 20 bp, Artificial Sequence
  mmSKRIPTE0009872_H2-M11_9
  gRNA
ccaggatcaggcccttggag

SEQ ID NO: 139094 - DNA, 20 bp, Artificial Sequence
  mmSKRIPTE0009873_Ighv11-1_1
  gRNA
gatgagcaatgtgcgatctg

SEQ ID NO: 139095 - DNA, 20 bp, Artificial Sequence
  mmSKRIPTE0009874_Ighv11-1_2
  gRNA
acatggatatgaggaacacg

SEQ ID NO: 139096 - DNA, 20 bp, Artificial Sequence
  mmSKRIPTE0009875_Ighv11-1_3
  gRNA
taggccactctgaaccacca

SEQ ID NO: 139097 - DNA, 20 bp, Artificial Sequence
  mmSKRIPTE0009876_Ighv11-1_4
  gRNA
ggtatatagtgggagccaag

SEQ ID NO: 139098 - DNA, 20 bp, Artificial Sequence
  mmSKRIPTE0009877_Ighv11-1_5
  gRNA
cctattatgtgtttataacg

SEQ ID NO: 139099 - DNA, 20 bp, Artificial Sequence
  mmSKRIPTE0009878_Ighv11-1_6
  gRNA
cgcttactcacgtctcaaca

SEQ ID NO: 139100 - DNA, 20 bp, Artificial Sequence
  mmSKRIPTE0009879_Ighv11-1_7
  gRNA
gtgaagcgatcctttatgga

SEQ ID NO: 139101 - DNA, 20 bp, Artificial Sequence
  mmSKRIPTE0009880_Ighv11-1_8
  gRNA
ctggataagtcagattatga

SEQ ID NO: 139102 - DNA, 20 bp, Artificial Sequence
  mmSKRIPTE0009881_Ighv11-1_9
  gRNA
ggtttatgtctagtttcacc

SEQ ID NO: 139103 - DNA, 20 bp, Artificial Sequence
  mmSKRIPTE0009882_Iglc1_1
  gRNA
tgtgaccttcatgagtgacc

SEQ ID NO: 139104 - DNA, 20 bp, Artificial Sequence
  mmSKRIPTE0009883_Iglc1_2
  gRNA
tatggtaggcaaaagcacca

SEQ ID NO: 139105 - DNA, 20 bp, Artificial Sequence
  mmSKRIPTE0009884_Iglc1_3
  gRNA
cactgatttctacccaggtg

SEQ ID NO: 139106 - DNA, 20 bp, Artificial Sequence
  mmSKRIPTE0009885_Iglc1_4
  gRNA
ctggaatttagagtagtgtg

SEQ ID NO: 139107 - DNA, 20 bp, Artificial Sequence
  mmSKRIPTE0009886_Iglc1_5
  gRNA
ctgatggcgaagacttgggc

SEQ ID NO: 139108 - DNA, 20 bp, Artificial Sequence
  mmSKRIPTE0009887_Iglc1_6
  gRNA
gttagtctcgagctcttcag

SEQ ID NO: 139109 - DNA, 20 bp, Artificial Sequence
  mmSKRIPTE0009888_Iglc1_7
  gRNA
tgacctaggaacagtcagca

SEQ ID NO: 139110 - DNA, 20 bp, Artificial Sequence
  mmSKRIPTE0009889_Iglc1_8
  gRNA
ataacctgcatcattgcccc

SEQ ID NO: 139111 - DNA, 20 bp, Artificial Sequence
  mmSKRIPTE0009890_Iglc1_9
  gRNA
tctttcagtagcaatcctgg

SEQ ID NO: 139112 - DNA, 20 bp, Artificial Sequence
  mmSKRIPTE0009891_Gm11127_1
  gRNA
aggttatgagtgcatatctg

SEQ ID NO: 139113 - DNA, 20 bp, Artificial Sequence
  mmSKRIPTE0009892_Gm11127_2
  gRNA
cttgacccagtatccaagag

SEQ ID NO: 139114 - DNA, 20 bp, Artificial Sequence
  mmSKRIPTE0009893_Gm11127_3
  gRNA
tgcatatcctggattgtgtg

SEQ ID NO: 139115 - DNA, 20 bp, Artificial Sequence
  mmSKRIPTE0009894_Gm11127_4
  gRNA
aatgattaccatgttagagt

SEQ ID NO: 139116 - DNA, 20 bp, Artificial Sequence
  mmSKRIPTE0009895_Gm11127_5
  gRNA
aaaaggaggggtctattgtt

SEQ ID NO: 139117 - DNA, 20 bp, Artificial Sequence
  mmSKRIPTE0009896_Gm11127_6
  gRNA
gacctcctctcaatgggcat

SEQ ID NO: 139118 - DNA, 20 bp, Artificial Sequence
  mmSKRIPTE0009897_Gm11127_7
  gRNA
gtgagagtcctggagtacct

SEQ ID NO: 139119 - DNA, 20 bp, Artificial Sequence
  mmSKRIPTE0009898_Gm11127_8
  gRNA
cagctttcctacacctccat

SEQ ID NO: 139120 - DNA, 20 bp, Artificial Sequence
  mmSKRIPTE0009899_Gm11127_9
  gRNA
gagcctcggttcaccgccgt

SEQ ID NO: 139121 - DNA, 20 bp, Artificial Sequence
  mmSKRIPTE0009900_Rora_1
  gRNA
aaaatacatcctttacgccg

SEQ ID NO: 139122 - DNA, 20 bp, Artificial Sequence
  mmSKRIPTE0009901_Rora_2
  gRNA
tttctggtgtacatgcgaca

SEQ ID NO: 139123 - DNA, 20 bp, Artificial Sequence
  mmSKRIPTE0009902_Rora_3
  gRNA
gagctccagtggctacgctg

SEQ ID NO: 139124 - DNA, 20 bp, Artificial Sequence
  mmSKRIPTE0009903_Rora_4
  gRNA
cctccgtgcaggctcgctag

SEQ ID NO: 139125 - DNA, 20 bp, Artificial Sequence
  mmSKRIPTE0009904_Rora_5
  gRNA
agtcacgagagtgaaaacca

SEQ ID NO: 139126 - DNA, 20 bp, Artificial Sequence
  mmSKRIPTE0009905_Rora_6
  gRNA
gagagacagcttgtacgccg

SEQ ID NO: 139127 - DNA, 20 bp, Artificial Sequence
  mmSKRIPTE0009906_Rora_7
  gRNA
gttaagttatgggacgaact

SEQ ID NO: 139128 - DNA, 20 bp, Artificial Sequence
  mmSKRIPTE0009907_Rora_8
  gRNA
agcgctgtgccatctcagga

SEQ ID NO: 139129 - DNA, 20 bp, Artificial Sequence
  mmSKRIPTE0009908_Rora_9
  gRNA
tattggctcctaaaataacg

SEQ ID NO: 139130 - DNA, 20 bp, Artificial Sequence
  mmSKRIPTE0009909_Ighv1-49_1
  gRNA
acgctgtgagtggactcctg

SEQ ID NO: 139131 - DNA, 20 bp, Artificial Sequence
  mmSKRIPTE0009910_Ighv1-49_2
  gRNA
tagtctttctgtaatctcag

SEQ ID NO: 139132 - DNA, 20 bp, Artificial Sequence
  mmSKRIPTE0009911_Ighv1-49_3
  gRNA
cttcacccagtgcatagcac

SEQ ID NO: 139133 - DNA, 20 bp, Artificial Sequence
  mmSKRIPTE0009912_Ighv1-49_4
  gRNA
agaggcactctaggactatg

SEQ ID NO: 139134 - DNA, 20 bp, Artificial Sequence
  mmSKRIPTE0009913_Ighv1-49_5
  gRNA
cactgggtgaagcaaagacc

SEQ ID NO: 139135 - DNA, 20 bp, Artificial Sequence
  mmSKRIPTE0009914_Ighv1-49_6
  gRNA
gacctggacatggcctggaa

SEQ ID NO: 139136 - DNA, 20 bp, Artificial Sequence
  mmSKRIPTE0009915_Ighv1-49_7
  gRNA
gagctgagttggtgagacct

SEQ ID NO: 139137 - DNA, 20 bp, Artificial Sequence
  mmSKRIPTE0009916_Ighv1-49_8
  gRNA
gtgcatagcactggccatga

SEQ ID NO: 139138 - DNA, 20 bp, Artificial Sequence
  mmSKRIPTE0009917_Nlrc5_1
  gRNA
gggttgaggattatccacga

SEQ ID NO: 139139 - DNA, 20 bp, Artificial Sequence
  mmSKRIPTE0009918_Nlrc5_2
  gRNA
ctgcatacctctaagtagtg

SEQ ID NO: 139140 - DNA, 20 bp, Artificial Sequence
  mmSKRIPTE0009919_Nlrc5_3
  gRNA
atggtaagggctcaaacggg

SEQ ID NO: 139141 - DNA, 20 bp, Artificial Sequence
  mmSKRIPTE0009920_Nlrc5_4
  gRNA
gcggagccgatatgccagag

SEQ ID NO: 139142 - DNA, 20 bp, Artificial Sequence
  mmSKRIPTE0009921_Nlrc5_5
  gRNA
ccagttatgagacccatcag

SEQ ID NO: 139143 - DNA, 20 bp, Artificial Sequence
  mmSKRIPTE0009922_Nlrc5_6
  gRNA
agtatgattatacccttgtg

SEQ ID NO: 139144 - DNA, 20 bp, Artificial Sequence
  mmSKRIPTE0009923_Nlrc5_7
  gRNA
gctgcattcacatagcctaa

SEQ ID NO: 139145 - DNA, 20 bp, Artificial Sequence
  mmSKRIPTE0009924_Nlrc5_8
  gRNA
gaggtatggtgagttgctcg

SEQ ID NO: 139146 - DNA, 20 bp, Artificial Sequence
  mmSKRIPTE0009925_Nlrc5_9
  gRNA
aggtcaccccagtctgagag

SEQ ID NO: 139147 - DNA, 20 bp, Artificial Sequence
  mmSKRIPTE0009926_Fpr2_1
  gRNA
ggagcaatgtactacaagag

SEQ ID NO: 139148 - DNA, 20 bp, Artificial Sequence
  mmSKRIPTE0009927_Fpr2_2
  gRNA
cccttatcacagacttcatg

SEQ ID NO: 139149 - DNA, 20 bp, Artificial Sequence
  mmSKRIPTE0009928_Fpr2_3
  gRNA
aacacaaatgcagcggtcca

SEQ ID NO: 139150 - DNA, 20 bp, Artificial Sequence
  mmSKRIPTE0009929_Fpr2_4
  gRNA
tgtataccacctgctactac

SEQ ID NO: 139151 - DNA, 20 bp, Artificial Sequence
  mmSKRIPTE0009930_Fpr2_5
  gRNA
ctgtaaggactcgtaaagga

SEQ ID NO: 139152 - DNA, 20 bp, Artificial Sequence
  mmSKRIPTE0009931_Fpr2_6
  gRNA
taaatctctcacgaaagtcc

SEQ ID NO: 139153 - DNA, 20 bp, Artificial Sequence
  mmSKRIPTE0009932_Fpr2_7
  gRNA
cttacactcttcggttcctg

SEQ ID NO: 139154 - DNA, 20 bp, Artificial Sequence
  mmSKRIPTE0009933_Fpr2_8
  gRNA
caaacagcaacaattgacat

SEQ ID NO: 139155 - DNA, 20 bp, Artificial Sequence
  mmSKRIPTE0009934_Fpr2_9
  gRNA
tctctcaagactataaggca

SEQ ID NO: 139156 - DNA, 20 bp, Artificial Sequence
  mmSKRIPTE0009935_Ighv1-11_1
  gRNA
tggcagcaattacatgtaag

SEQ ID NO: 139157 - DNA, 20 bp, Artificial Sequence
  mmSKRIPTE0009936_Ighv1-11_2
  gRNA
ggaccggtctacagagaatg

SEQ ID NO: 139158 - DNA, 20 bp, Artificial Sequence
  mmSKRIPTE0009937_Ighv1-11_3
  gRNA
tctgggtcctctcagttaca

SEQ ID NO: 139159 - DNA, 20 bp, Artificial Sequence
  mmSKRIPTE0009938_Ighv1-11_4
  gRNA
tgaggatgggccacacactc

SEQ ID NO: 139160 - DNA, 20 bp, Artificial Sequence
  mmSKRIPTE0009939_Ighv1-11_5
  gRNA
aacaaggtacttgttagata

SEQ ID NO: 139161 - DNA, 20 bp, Artificial Sequence
  mmSKRIPTE0009940_Ighv1-11_6
  gRNA
gacagtgtcactgatgcccc

SEQ ID NO: 139162 - DNA, 20 bp, Artificial Sequence
  mmSKRIPTE0009941_Ighv1-11_7
  gRNA
ggaaggatttatccagtaag

SEQ ID NO: 139163 - DNA, 20 bp, Artificial Sequence
  mmSKRIPTE0009942_Ighv1-11_8
  gRNA
ctgggagtaggcacctatgg

SEQ ID NO: 139164 - DNA, 20 bp, Artificial Sequence
  mmSKRIPTE0009943_Ighv1-11_9
  gRNA
tacagaacttcattatggga

SEQ ID NO: 139165 - DNA, 20 bp, Artificial Sequence
  mmSKRIPTE0009944_Ifne_1
  gRNA
aacttgggaaacgacgtaca

SEQ ID NO: 139166 - DNA, 20 bp, Artificial Sequence
  mmSKRIPTE0009945_Ifne_2
  gRNA
cagggtttcagatgcgtgag

SEQ ID NO: 139167 - DNA, 20 bp, Artificial Sequence
  mmSKRIPTE0009946_Ifne_3
  gRNA
gaatacgtggagtcactggg

SEQ ID NO: 139168 - DNA, 20 bp, Artificial Sequence
  mmSKRIPTE0009947_Ifne_4
  gRNA
cttagaacacagttaaacct

SEQ ID NO: 139169 - DNA, 20 bp, Artificial Sequence
  mmSKRIPTE0009948_Ifne_5
  gRNA
gggaatccgtttcggttcta

SEQ ID NO: 139170 - DNA, 20 bp, Artificial Sequence
  mmSKRIPTE0009949_Ifne_6
  gRNA
tcacgctcctccagacacat

SEQ ID NO: 139171 - DNA, 20 bp, Artificial Sequence
  mmSKRIPTE0009950_Ifne_7
  gRNA
ggaaatgttccataaaaccc

SEQ ID NO: 139172 - DNA, 20 bp, Artificial Sequence
  mmSKRIPTE0009951_Ifne_8
  gRNA
gagtcctcaccagtaccaag

SEQ ID NO: 139173 - DNA, 20 bp, Artificial Sequence
  mmSKRIPTE0009952_Ifne_9
  gRNA
cactgctggactgacgagct

SEQ ID NO: 139174 - DNA, 20 bp, Artificial Sequence
  mmSKRIPTE0009953_Oas1d_1
  gRNA
cactgtgtaaggatatcttg

SEQ ID NO: 139175 - DNA, 20 bp, Artificial Sequence
  mmSKRIPTE0009954_Oas1d_2
  gRNA
ccagtttgctgtatgctgtg

SEQ ID NO: 139176 - DNA, 20 bp, Artificial Sequence
  mmSKRIPTE0009955_Oas1d_3
  gRNA
tgagacatataagatccagt

SEQ ID NO: 139177 - DNA, 20 bp, Artificial Sequence
  mmSKRIPTE0009956_Oas1d_4
  gRNA
agctggcctttacagaagtg

SEQ ID NO: 139178 - DNA, 20 bp, Artificial Sequence
  mmSKRIPTE0009957_Oas1d_5
  gRNA
tctatgggcttcggcgaaca

SEQ ID NO: 139179 - DNA, 20 bp, Artificial Sequence
  mmSKRIPTE0009958_Oas1d_6
  gRNA
attgcagcctgactcctaca

SEQ ID NO: 139180 - DNA, 20 bp, Artificial Sequence
  mmSKRIPTE0009959_Oas1d_7
  gRNA
ggtcatttcacaccatccag

SEQ ID NO: 139181 - DNA, 20 bp, Artificial Sequence
  mmSKRIPTE0009960_Oas1d_8
  gRNA
gtgctattcagagctatcat

SEQ ID NO: 139182 - DNA, 20 bp, Artificial Sequence
  mmSKRIPTE0009961_Oas1d_9
  gRNA
tacgggatccacgaaaaccc

SEQ ID NO: 139183 - DNA, 20 bp, Artificial Sequence
  mmSKRIPTE0009962_Ighv12-3_1
  gRNA
atgtaccccatccattctag

SEQ ID NO: 139184 - DNA, 20 bp, Artificial Sequence
  mmSKRIPTE0009963_Ighv12-3_2
  gRNA
tccctttggtcattacaatg

SEQ ID NO: 139185 - DNA, 20 bp, Artificial Sequence
  mmSKRIPTE0009964_Ighv12-3_3
  gRNA
aatggcacaactcaccagga

SEQ ID NO: 139186 - DNA, 20 bp, Artificial Sequence
  mmSKRIPTE0009965_Ighv12-3_4
  gRNA
actaagttaaatcccatcct

SEQ ID NO: 139187 - DNA, 20 bp, Artificial Sequence
  mmSKRIPTE0009966_Ighv12-3_5
  gRNA
tttctctagtaatggagatg

SEQ ID NO: 139188 - DNA, 20 bp, Artificial Sequence
  mmSKRIPTE0009967_Ighv12-3_6
  gRNA
gtgactgtgagggtttcacc

SEQ ID NO: 139189 - DNA, 20 bp, Artificial Sequence
  mmSKRIPTE0009968_Ighv12-3_7
  gRNA
ggggaaaccagtaatagagc

SEQ ID NO: 139190 - DNA, 20 bp, Artificial Sequence
  mmSKRIPTE0009969_Ighv12-3_8
  gRNA
ccagatccagtagtaaccac

SEQ ID NO: 139191 - DNA, 20 bp, Artificial Sequence
  mmSKRIPTE0009970_Ighv12-3_9
  gRNA
acacgggacactgaactctg

SEQ ID NO: 139192 - DNA, 20 bp, Artificial Sequence
  mmSKRIPTE0009971_H2-Q7_1
  gRNA
agtcgaccggaatcccccag

SEQ ID NO: 139193 - DNA, 20 bp, Artificial Sequence
  mmSKRIPTE0009972_H2-Q7_2
  gRNA
gaaagaccaggcctacctgg

SEQ ID NO: 139194 - DNA, 20 bp, Artificial Sequence
  mmSKRIPTE0009973_H2-Q7_3
  gRNA
tgtggggacaggattgtctg

SEQ ID NO: 139195 - DNA, 20 bp, Artificial Sequence
  mmSKRIPTE0009974_H2-Q7_4
  gRNA
tgcagcgagtgttggcctgg

SEQ ID NO: 139196 - DNA, 20 bp, Artificial Sequence
  mmSKRIPTE0009975_H2-Q7_5
  gRNA
tctggggcctgattggagag

SEQ ID NO: 139197 - DNA, 20 bp, Artificial Sequence
  mmSKRIPTE0009976_H2-Q7_6
  gRNA
agatgggaatccccagccat

SEQ ID NO: 139198 - DNA, 20 bp, Artificial Sequence
  mmSKRIPTE0009977_H2-Q7_7
  gRNA
ctcccccatctcagggtaag

SEQ ID NO: 139199 - DNA, 20 bp, Artificial Sequence
  mmSKRIPTE0009978_H2-Q7_8
  gRNA
gtgggtgtgggcagacaacc

SEQ ID NO: 139200 - DNA, 20 bp, Artificial Sequence
  mmSKRIPTE0009979_H2-Q7_9
  gRNA
ggccatgagcagagtttccg

SEQ ID NO: 139201 - DNA, 20 bp, Artificial Sequence
  mmSKRIPTE0009980_Ighv1-9_1
  gRNA
cactggctactggatagagt

SEQ ID NO: 139202 - DNA, 20 bp, Artificial Sequence
  mmSKRIPTE0009981_Ighv1-9_2
  gRNA
taattgagcaggagaactac

SEQ ID NO: 139203 - DNA, 20 bp, Artificial Sequence
  mmSKRIPTE0009982_Ighv1-9_3
  gRNA
ggcactataagtctgtgtgt

SEQ ID NO: 139204 - DNA, 20 bp, Artificial Sequence
  mmSKRIPTE0009983_Ighv1-9_4
  gRNA
ttgaacatagactctaacca

SEQ ID NO: 139205 - DNA, 20 bp, Artificial Sequence
  mmSKRIPTE0009984_Ighv1-9_5
  gRNA
tttctgatatttcagaccca

SEQ ID NO: 139206 - DNA, 20 bp, Artificial Sequence
  mmSKRIPTE0009985_Ighv1-9_6
  gRNA
ggacagtaggcacatgcgtc

SEQ ID NO: 139207 - DNA, 20 bp, Artificial Sequence
  mmSKRIPTE0009986_Anxa3_1
  gRNA
tcctcctatgaaatacgcag

SEQ ID NO: 139208 - DNA, 20 bp, Artificial Sequence
  mmSKRIPTE0009987_Anxa3_2
  gRNA
tgtgaactccctgaatgcga

SEQ ID NO: 139209 - DNA, 20 bp, Artificial Sequence
  mmSKRIPTE0009988_Anxa3_3
  gRNA
aagaacgggattaagtagtg

SEQ ID NO: 139210 - DNA, 20 bp, Artificial Sequence
  mmSKRIPTE0009989_Anxa3_4
  gRNA
gcttctcaaaacgctagccg

SEQ ID NO: 139211 - DNA, 20 bp, Artificial Sequence
  mmSKRIPTE0009990_Anxa3_5
  gRNA
ccacttcgagcacgtcatgg

SEQ ID NO: 139212 - DNA, 20 bp, Artificial Sequence
  mmSKRIPTE0009991_Anxa3_6
  gRNA
gtaacgtgcttacagtggca

SEQ ID NO: 139213 - DNA, 20 bp, Artificial Sequence
  mmSKRIPTE0009992_Anxa3_7
  gRNA
gctatccggaaagcgatcag

SEQ ID NO: 139214 - DNA, 20 bp, Artificial Sequence
  mmSKRIPTE0009993_Anxa3_8
  gRNA
ctcacataggatcacttccg

SEQ ID NO: 139215 - DNA, 20 bp, Artificial Sequence
  mmSKRIPTE0009994_Anxa3_9
  gRNA
agtgtataagaagagcctcg

SEQ ID NO: 139216 - DNA, 20 bp, Artificial Sequence
  mmSKRIPTE0009995_Ighv8-2_1
  gRNA
ctgcacaccagtgtttactc

SEQ ID NO: 139217 - DNA, 20 bp, Artificial Sequence
  mmSKRIPTE0009996_Ighv8-2_2
  gRNA
tctgttccttcctaatagag

SEQ ID NO: 139218 - DNA, 20 bp, Artificial Sequence
  mmSKRIPTE0009997_Ighv8-2_3
  gRNA
cctcagggaaggctttagag

SEQ ID NO: 139219 - DNA, 20 bp, Artificial Sequence
  mmSKRIPTE0009998_Ighv8-2_4
  gRNA
attccttaaactcaccagtg

SEQ ID NO: 139220 - DNA, 20 bp, Artificial Sequence
  mmSKRIPTE0009999_Ighv8-2_5
  gRNA
tctccaagcaccgtagtatg

SEQ ID NO: 139221 - DNA, 20 bp, Artificial Sequence
  mmSKRIPTE0010000_Ighv8-2_6
  gRNA
cagatggtaaggttgaaaga

SEQ ID NO: 139222 - DNA, 20 bp, Artificial Sequence
  mmSKRIPTE0010001_Ighv8-2_7
  gRNA
tgaggtgctgacttgaatgg

SEQ ID NO: 139223 - DNA, 20 bp, Artificial Sequence
  mmSKRIPTE0010002_Ighv8-2_8
  gRNA
tggcactcacatgcagggac

SEQ ID NO: 139224 - DNA, 20 bp, Artificial Sequence
  mmSKRIPTE0010003_Ighv8-2_9
  gRNA
gtgatggctgcaatatccca

SEQ ID NO: 139225 - DNA, 20 bp, Artificial Sequence
  mmSKRIPTE0010004_Mir125a_1
  gRNA
ttaacctgtgaggacgtcca

SEQ ID NO: 139226 - DNA, 20 bp, Artificial Sequence
  mmSKRIPTE0010005_Mir125a_2
  gRNA
agctagaggaaggttgccag

SEQ ID NO: 139227 - DNA, 20 bp, Artificial Sequence
  mmSKRIPTE0010006_Mir125a_3
  gRNA
tttccccagaggtgggaacg

SEQ ID NO: 139228 - DNA, 20 bp, Artificial Sequence
  mmSKRIPTE0010007_Mir125a_4
  gRNA
agaagatagtgacctttgtg

SEQ ID NO: 139229 - DNA, 20 bp, Artificial Sequence
  mmSKRIPTE0010008_Mir125a_5
  gRNA
ggaaataagacccataacag

SEQ ID NO: 139230 - DNA, 20 bp, Artificial Sequence
  mmSKRIPTE0010009_Mir125a_6
  gRNA
gtccaccatagctacactgc

SEQ ID NO: 139231 - DNA, 20 bp, Artificial Sequence
  mmSKRIPTE0010010_Mir125a_7
  gRNA
gaaactcaatctctgatcac

SEQ ID NO: 139232 - DNA, 20 bp, Artificial Sequence
  mmSKRIPTE0010011_Mir125a_8
  gRNA
aaatccctaaatttgtggct

SEQ ID NO: 139233 - DNA, 20 bp, Artificial Sequence
  mmSKRIPTE0010012_Mir125a_9
  gRNA
ctaagccccagaagatagaa

SEQ ID NO: 139234 - DNA, 20 bp, Artificial Sequence
  mmSKRIPTE0010013_Ighv6-4_1
  gRNA
tattatcccgagtctgtgaa

SEQ ID NO: 139235 - DNA, 20 bp, Artificial Sequence
  mmSKRIPTE0010014_Ighv6-4_2
  gRNA
accatttctactatctagtg

SEQ ID NO: 139236 - DNA, 20 bp, Artificial Sequence
  mmSKRIPTE0010015_Ighv6-4_3
  gRNA
ctgtttatagagatatgggg

SEQ ID NO: 139237 - DNA, 20 bp, Artificial Sequence
  mmSKRIPTE0010016_Ighv6-4_4
  gRNA
ggagttctgaggtccattag

SEQ ID NO: 139238 - DNA, 20 bp, Artificial Sequence
  mmSKRIPTE0010017_Ighv6-4_5
  gRNA
atctacaaaagtaaatccag

SEQ ID NO: 139239 - DNA, 20 bp, Artificial Sequence
  mmSKRIPTE0010018_Ighv6-4_6
  gRNA
tggccatgtaacctagagac

SEQ ID NO: 139240 - DNA, 20 bp, Artificial Sequence
  mmSKRIPTE0010019_Ighv6-4_7
  gRNA
ggaggcttagttaaacctgg

SEQ ID NO: 139241 - DNA, 20 bp, Artificial Sequence
  mmSKRIPTE0010020_Ighv6-4_8
  gRNA
ggtggatagattcacaatga

SEQ ID NO: 139242 - DNA, 20 bp, Artificial Sequence
  mmSKRIPTE0010021_Ighv6-4_9
  gRNA
ctactgtttatagagatatg

SEQ ID NO: 139243 - DNA, 20 bp, Artificial Sequence
  mmSKRIPTE0010022_Mir223_1
  gRNA
tttgtcaaataccccaagtg

SEQ ID NO: 139244 - DNA, 20 bp, Artificial Sequence
  mmSKRIPTE0010023_Mir223_2
  gRNA
gctgagttggacactctgtg

SEQ ID NO: 139245 - DNA, 20 bp, Artificial Sequence
  mmSKRIPTE0010024_Mir223_3
  gRNA
ccagatcaggaacctccact

SEQ ID NO: 139246 - DNA, 20 bp, Artificial Sequence
  mmSKRIPTE0010025_Mir223_4
  gRNA
gtaggaacgatgcagctctg

SEQ ID NO: 139247 - DNA, 20 bp, Artificial Sequence
  mmSKRIPTE0010026_Mir223_5
  gRNA
taccctaagtgtgagacaaa

SEQ ID NO: 139248 - DNA, 20 bp, Artificial Sequence
  mmSKRIPTE0010027_Mir223_6
  gRNA
tgtacattgtgaaaatgcca

SEQ ID NO: 139249 - DNA, 20 bp, Artificial Sequence
  mmSKRIPTE0010028_Mir223_7
  gRNA
agcattcatatgtaggcagc

SEQ ID NO: 139250 - DNA, 20 bp, Artificial Sequence
  mmSKRIPTE0010029_Mir223_8
  gRNA
caaacaaaaacggggatcct

SEQ ID NO: 139251 - DNA, 20 bp, Artificial Sequence
  mmSKRIPTE0010030_Mir223_9
  gRNA
gataggcatgagccacactt

SEQ ID NO: 139252 - DNA, 20 bp, Artificial Sequence
  mmSKRIPTE0010031_Ighv6-3_1
  gRNA
gctatatcatgagctcaggg

SEQ ID NO: 139253 - DNA, 20 bp, Artificial Sequence
  mmSKRIPTE0010032_Ighv6-3_2
  gRNA
ctgacagaggcacctaactg

SEQ ID NO: 139254 - DNA, 20 bp, Artificial Sequence
  mmSKRIPTE0010033_Ighv6-3_3
  gRNA
attatgcggagtctgtgaaa

SEQ ID NO: 139255 - DNA, 20 bp, Artificial Sequence
  mmSKRIPTE0010034_Ighv6-3_4
  gRNA
tttcccttcagtgaccaaca

SEQ ID NO: 139256 - DNA, 20 bp, Artificial Sequence
  mmSKRIPTE0010035_Ighv6-3_5
  gRNA
ctagacacaaacttacccaa

SEQ ID NO: 139257 - DNA, 20 bp, Artificial Sequence
  mmSKRIPTE0010036_Ighv6-3_6
  gRNA
taaatgggctattgtttaca

SEQ ID NO: 139258 - DNA, 20 bp, Artificial Sequence
  mmSKRIPTE0010037_Ighv6-3_7
  gRNA
ccactccagatggtggagga

SEQ ID NO: 139259 - DNA, 20 bp, Artificial Sequence
  mmSKRIPTE0010038_Ighv6-3_8
  gRNA
tgaatgttctgtgtccgtgt

SEQ ID NO: 139260 - DNA, 20 bp, Artificial Sequence
  mmSKRIPTE0010039_Ighv6-3_9
  gRNA
tattgagtgtgtgagtggac

SEQ ID NO: 139261 - DNA, 20 bp, Artificial Sequence
  mmSKRIPTE0010040_Ighv2-3_1
  gRNA
gggtttggcacagtagtacg

SEQ ID NO: 139262 - DNA, 20 bp, Artificial Sequence
  mmSKRIPTE0010041_Ighv2-3_2
  gRNA
aaccagctatggtgtaagct

SEQ ID NO: 139263 - DNA, 20 bp, Artificial Sequence
  mmSKRIPTE0010042_Ighv2-3_3
  gRNA
gtatttgtgaatgctcacaa

SEQ ID NO: 139264 - DNA, 20 bp, Artificial Sequence
  mmSKRIPTE0010043_Ighv2-3_4
  gRNA
aaaatatctctgttgcggta

SEQ ID NO: 139265 - DNA, 20 bp, Artificial Sequence
  mmSKRIPTE0010044_Ighv2-3_5
  gRNA
aggacacaaaggaacttgcc

SEQ ID NO: 139266 - DNA, 20 bp, Artificial Sequence
  mmSKRIPTE0010045_Ighv2-3_6
  gRNA
tgggagtaatatggggtgac

SEQ ID NO: 139267 - DNA, 20 bp, Artificial Sequence
  mmSKRIPTE0010046_Ighv2-9-1_1
  gRNA
acaaccagcagggggctccg

SEQ ID NO: 139268 - DNA, 20 bp, Artificial Sequence
  mmSKRIPTE0010047_Ighv2-9-1_2
  gRNA
tggcttggagtaatatggac

SEQ ID NO: 139269 - DNA, 20 bp, Artificial Sequence
  mmSKRIPTE0010048_Ighv2-9-1_3
  gRNA
aaccagctatgctataagct

SEQ ID NO: 139270 - DNA, 20 bp, Artificial Sequence
  mmSKRIPTE0010049_Ighv2-9-1_4
  gRNA
taggttccagaagacatcct

SEQ ID NO: 139271 - DNA, 20 bp, Artificial Sequence
  mmSKRIPTE0010050_Ighv2-9-1_5
  gRNA
tggtgatgttgctcatcccc

SEQ ID NO: 139272 - DNA, 20 bp, Artificial Sequence
  mmSKRIPTE0010051_Ighv2-9-1_6
  gRNA
gtttctggcacagtagtacc

SEQ ID NO: 139273 - DNA, 20 bp, Artificial Sequence
  mmSKRIPTE0010052_Ighv1-85_1
  gRNA
ggttactgagcaactctaag

SEQ ID NO: 139274 - DNA, 20 bp, Artificial Sequence
  mmSKRIPTE0010053_Ighv1-85_2
  gRNA
cacaagctacgatataaact

SEQ ID NO: 139275 - DNA, 20 bp, Artificial Sequence
  mmSKRIPTE0010054_Ighv1-85_3
  gRNA
gtggagaggacattggccat

SEQ ID NO: 139276 - DNA, 20 bp, Artificial Sequence
  mmSKRIPTE0010055_Ighv1-85_4
  gRNA
tgttaggcagcagtatgctc

SEQ ID NO: 139277 - DNA, 20 bp, Artificial Sequence
  mmSKRIPTE0010056_Ighv1-85_5
  gRNA
ggcactgtaggaatgtgagg

SEQ ID NO: 139278 - DNA, 20 bp, Artificial Sequence
  mmSKRIPTE0010057_Ighv1-85_6
  gRNA
ggatggatttatcctagaga

SEQ ID NO: 139279 - DNA, 20 bp, Artificial Sequence
  mmSKRIPTE0010058_Ighv1-85_7
  gRNA
gaactgccatttcatgtgtt

SEQ ID NO: 139280 - DNA, 20 bp, Artificial Sequence
  mmSKRIPTE0010059_Ighv1-85_8
  gRNA
gcacagcttcctgctccccc

SEQ ID NO: 139281 - DNA, 20 bp, Artificial Sequence
  mmSKRIPTE0010060_H2-M9_1
  gRNA
tcgaggccatgataagaagg

SEQ ID NO: 139282 - DNA, 20 bp, Artificial Sequence
  mmSKRIPTE0010061_H2-M9_2
  gRNA
gctggcgattcaggacccta

SEQ ID NO: 139283 - DNA, 20 bp, Artificial Sequence
  mmSKRIPTE0010062_H2-M9_3
  gRNA
agcctggatgtagcacatag

SEQ ID NO: 139284 - DNA, 20 bp, Artificial Sequence
  mmSKRIPTE0010063_H2-M9_4
  gRNA
tcccagttactgcaccccca

SEQ ID NO: 139285 - DNA, 20 bp, Artificial Sequence
  mmSKRIPTE0010064_H2-M9_5
  gRNA
ggatgcggcaatctattcct

SEQ ID NO: 139286 - DNA, 20 bp, Artificial Sequence
  mmSKRIPTE0010065_H2-M9_6
  gRNA
tccattaggaaaagtcacat

SEQ ID NO: 139287 - DNA, 20 bp, Artificial Sequence
  mmSKRIPTE0010066_H2-M9_7
  gRNA
gggttcaggaggatcttggg

SEQ ID NO: 139288 - DNA, 20 bp, Artificial Sequence
  mmSKRIPTE0010067_H2-M9_8
  gRNA
tggatgctttgcgatgacca

SEQ ID NO: 139289 - DNA, 20 bp, Artificial Sequence
  mmSKRIPTE0010068_H2-M9_9
  gRNA
agtaacatgccctgtacaag

SEQ ID NO: 139290 - DNA, 20 bp, Artificial Sequence
  mmSKRIPTE0010069_Ighv2-5_1
  gRNA
ctagattctgaagtgaacct

SEQ ID NO: 139291 - DNA, 20 bp, Artificial Sequence
  mmSKRIPTE0010070_Ighv2-5_2
  gRNA
gggactaagacttgtcagcc

SEQ ID NO: 139292 - DNA, 20 bp, Artificial Sequence
  mmSKRIPTE0010071_Ighv2-5_3
  gRNA
agactgtgcaggttatggac

SEQ ID NO: 139293 - DNA, 20 bp, Artificial Sequence
  mmSKRIPTE0010072_Ighv2-5_4
  gRNA
actgtgcttgttgaagcacc

SEQ ID NO: 139294 - DNA, 20 bp, Artificial Sequence
  mmSKRIPTE0010073_Ighv2-5_5
  gRNA
atttcactagaaggatgatc

SEQ ID NO: 139295 - DNA, 20 bp, Artificial Sequence
  mmSKRIPTE0010074_Ighv2-7_1
  gRNA
cattccaatccctttctcgg

SEQ ID NO: 139296 - DNA, 20 bp, Artificial Sequence
  mmSKRIPTE0010075_Ighv2-7_2
  gRNA
ataccatgaatgccatacct

SEQ ID NO: 139297 - DNA, 20 bp, Artificial Sequence
  mmSKRIPTE0010076_Ighv2-7_3
  gRNA
gctggtcatgacatccctgt

SEQ ID NO: 139298 - DNA, 20 bp, Artificial Sequence
  mmSKRIPTE0010077_Ighv2-7_4
  gRNA
ttcccgactgagtgtcagca

SEQ ID NO: 139299 - DNA, 20 bp, Artificial Sequence
  mmSKRIPTE0010078_Ighv2-7_5
  gRNA
tttcgcaagcctccgagaaa

SEQ ID NO: 139300 - DNA, 20 bp, Artificial Sequence
  mmSKRIPTE0010079_Ighv2-7_6
  gRNA
gcacttgtgacaggacacct

SEQ ID NO: 139301 - DNA, 20 bp, Artificial Sequence
  mmSKRIPTE0010080_Ighv2-7_7
  gRNA
aaccgatgctcatacagcat

SEQ ID NO: 139302 - DNA, 20 bp, Artificial Sequence
  mmSKRIPTE0010081_Ighv2-7_8
  gRNA
ctccgagaaagggattggaa

SEQ ID NO: 139303 - DNA, 20 bp, Artificial Sequence
  mmSKRIPTE0010082_Ighv2-7_9
  gRNA
gagtctgtgatggctgcaca

SEQ ID NO: 139304 - DNA, 20 bp, Artificial Sequence
  mmSKRIPTE0010083_Ighv7-2_1
  gRNA
ctggccaaacaacataggta

SEQ ID NO: 139305 - DNA, 20 bp, Artificial Sequence
  mmSKRIPTE0010084_Ighv7-2_2
  gRNA
gagacaagtagctgtgcatg

SEQ ID NO: 139306 - DNA, 20 bp, Artificial Sequence
  mmSKRIPTE0010085_Ighv7-2_3
  gRNA
gactacagtgcatctatgaa

SEQ ID NO: 139307 - DNA, 20 bp, Artificial Sequence
  mmSKRIPTE0010086_Ighv7-2_4
  gRNA
ctccaaagaagtgtttgcgt

SEQ ID NO: 139308 - DNA, 20 bp, Artificial Sequence
  mmSKRIPTE0010087_Ighv7-2_5
  gRNA
ttgaaacaaacctcattgca

SEQ ID NO: 139309 - DNA, 20 bp, Artificial Sequence
  mmSKRIPTE0010088_Ighv7-2_6
  gRNA
caatattagagaactggtgc

SEQ ID NO: 139310 - DNA, 20 bp, Artificial Sequence
  mmSKRIPTE0010089_Ighv7-2_7
  gRNA
atgagattcccatgactggc

SEQ ID NO: 139311 - DNA, 20 bp, Artificial Sequence
  mmSKRIPTE0010090_Ighv7-2_8
  gRNA
gttcatgtagaaatcagtga

SEQ ID NO: 139312 - DNA, 20 bp, Artificial Sequence
  mmSKRIPTE0010091_Ighv7-2_9
  gRNA
tggtaatttgtggtgaaaat

SEQ ID NO: 139313 - DNA, 20 bp, Artificial Sequence
  mmSKRIPTE0010092_Ighv6-5_1
  gRNA
ctgtttatagagatctggtg

SEQ ID NO: 139314 - DNA, 20 bp, Artificial Sequence
  mmSKRIPTE0010093_Ighv6-5_2
  gRNA
gtgtgtactccatgaacctg

SEQ ID NO: 139315 - DNA, 20 bp, Artificial Sequence
  mmSKRIPTE0010094_Ighv6-5_3
  gRNA
ccaacccattctctgtagag

SEQ ID NO: 139316 - DNA, 20 bp, Artificial Sequence
  mmSKRIPTE0010095_Ighv6-5_4
  gRNA
cacagtagccatgcaaacca

SEQ ID NO: 139317 - DNA, 20 bp, Artificial Sequence
  mmSKRIPTE0010096_Ighv6-5_5
  gRNA
ccagagtgaagtgaaaattg

SEQ ID NO: 139318 - DNA, 20 bp, Artificial Sequence
  mmSKRIPTE0010097_Ighv6-5_6
  gRNA
accttgttgtaggtgttctg

SEQ ID NO: 139319 - DNA, 20 bp, Artificial Sequence
  mmSKRIPTE0010098_Ighv6-5_7
  gRNA
gtttcatggatcctccaggt

SEQ ID NO: 139320 - DNA, 20 bp, Artificial Sequence
  mmSKRIPTE0010099_Ighv6-5_8
  gRNA
acagttcagttccaagtcca

SEQ ID NO: 139321 - DNA, 20 bp, Artificial Sequence
  mmSKRIPTE0010100_Ighv6-5_9
  gRNA
gaaatggtatcaatagatag

SEQ ID NO: 139322 - DNA, 20 bp, Artificial Sequence
  mmSKRIPTE0010101_Ifna4_1
  gRNA
agtagtagctcatcattacc

SEQ ID NO: 139323 - DNA, 20 bp, Artificial Sequence
  mmSKRIPTE0010102_Ifna4_2
  gRNA
gggtaagatctcttagcaca

SEQ ID NO: 139324 - DNA, 20 bp, Artificial Sequence
  mmSKRIPTE0010103_Ifna4_3
  gRNA
aggaggttcctgcatcacac

SEQ ID NO: 139325 - DNA, 20 bp, Artificial Sequence
  mmSKRIPTE0010104_Ifna4_4
  gRNA
agcatctacaagacccacaa

SEQ ID NO: 139326 - DNA, 20 bp, Artificial Sequence
  mmSKRIPTE0010105_Ifna4_5
  gRNA
ttaagagagatgtacacagc

SEQ ID NO: 139327 - DNA, 20 bp, Artificial Sequence
  mmSKRIPTE0010106_Ifna4_6
  gRNA
caagagggccttgacagtcc

SEQ ID NO: 139328 - DNA, 20 bp, Artificial Sequence
  mmSKRIPTE0010107_Ifna4_7
  gRNA
gattgctgaaacatctatgc

SEQ ID NO: 139329 - DNA, 20 bp, Artificial Sequence
  mmSKRIPTE0010108_Ifna4_8
  gRNA
tcttgccagcaagttggttg

SEQ ID NO: 139330 - DNA, 20 bp, Artificial Sequence
  mmSKRIPTE0010109_Skint2_1
  gRNA
aagccagtagaatagtatgg

SEQ ID NO: 139331 - DNA, 20 bp, Artificial Sequence
  mmSKRIPTE0010110_Skint2_2
  gRNA
tgctccccatatagggccaa

SEQ ID NO: 139332 - DNA, 20 bp, Artificial Sequence
  mmSKRIPTE0010111_Skint2_3
  gRNA
atggcaccacatactcccaa

SEQ ID NO: 139333 - DNA, 20 bp, Artificial Sequence
  mmSKRIPTE0010112_Skint2_4
  gRNA
tcaaaaagtctacaggaccc

SEQ ID NO: 139334 - DNA, 20 bp, Artificial Sequence
  mmSKRIPTE0010113_Skint2_5
  gRNA
aatgtacatgactgagcttg

SEQ ID NO: 139335 - DNA, 20 bp, Artificial Sequence
  mmSKRIPTE0010114_Skint2_6
  gRNA
tcacagtgactggcttacag

SEQ ID NO: 139336 - DNA, 20 bp, Artificial Sequence
  mmSKRIPTE0010115_Skint2_7
  gRNA
gatagcaagtgatactcctg

SEQ ID NO: 139337 - DNA, 20 bp, Artificial Sequence
  mmSKRIPTE0010116_Skint2_8
  gRNA
tatcattccagctacatcaa

SEQ ID NO: 139338 - DNA, 20 bp, Artificial Sequence
  mmSKRIPTE0010117_Skint2_9
  gRNA
aggtatacaatattcctccc

SEQ ID NO: 139339 - DNA, 20 bp, Artificial Sequence
  mmSKRIPTE0010118_Ighv14-3_1
  gRNA
gttaggacttggactgactc

SEQ ID NO: 139340 - DNA, 20 bp, Artificial Sequence
  mmSKRIPTE0010119_Ighv14-3_2
  gRNA
gccactgtcacagagtgtgt

SEQ ID NO: 139341 - DNA, 20 bp, Artificial Sequence
  mmSKRIPTE0010120_Ighv14-3_3
  gRNA
aggtggaggaagcagacgta

SEQ ID NO: 139342 - DNA, 20 bp, Artificial Sequence
  mmSKRIPTE0010121_Ighv14-3_4
  gRNA
tatttagtattaccattcgc

SEQ ID NO: 139343 - DNA, 20 bp, Artificial Sequence
  mmSKRIPTE0010122_Ighv14-3_5
  gRNA
taaaaacacctatatgcact

SEQ ID NO: 139344 - DNA, 20 bp, Artificial Sequence
  mmSKRIPTE0010123_Ighv14-3_6
  gRNA
tatagggctcatatgatgtt

SEQ ID NO: 139345 - DNA, 20 bp, Artificial Sequence
  mmSKRIPTE0010124_Ighv14-3_7
  gRNA
gtcagaaaccatagaactgc

SEQ ID NO: 139346 - DNA, 20 bp, Artificial Sequence
  mmSKRIPTE0010125_Ighv14-3_8
  gRNA
tggacccaggagttaggact

SEQ ID NO: 139347 - DNA, 20 bp, Artificial Sequence
  mmSKRIPTE0010126_Ighv14-3_9
  gRNA
ttacataaggacattccagc

SEQ ID NO: 139348 - DNA, 20 bp, Artificial Sequence
  mmSKRIPTE0010127_Cebpd_1
  gRNA
gagcagctgtgtcgtcaccc

SEQ ID NO: 139349 - DNA, 20 bp, Artificial Sequence
  mmSKRIPTE0010128_Cebpd_2
  gRNA
gagaccctgaagaactgcag

SEQ ID NO: 139350 - DNA, 20 bp, Artificial Sequence
  mmSKRIPTE0010129_Cebpd_3
  gRNA
atgttatcaaacttgtagga

SEQ ID NO: 139351 - DNA, 20 bp, Artificial Sequence
  mmSKRIPTE0010130_Cebpd_4
  gRNA
caagcgcacagatgtcaggg

SEQ ID NO: 139352 - DNA, 20 bp, Artificial Sequence
  mmSKRIPTE0010131_Cebpd_5
  gRNA
gattgagctgctgagtacag

SEQ ID NO: 139353 - DNA, 20 bp, Artificial Sequence
  mmSKRIPTE0010132_Cebpd_6
  gRNA
cctcacacccaacattgtat

SEQ ID NO: 139354 - DNA, 20 bp, Artificial Sequence
  mmSKRIPTE0010133_Cebpd_7
  gRNA
aaaccacaaagtgtttaggt

SEQ ID NO: 139355 - DNA, 20 bp, Artificial Sequence
  mmSKRIPTE0010134_Cebpd_8
  gRNA
acaagcctgcactttgggca

SEQ ID NO: 139356 - DNA, 20 bp, Artificial Sequence
  mmSKRIPTE0010135_Cebpd_9
  gRNA
cttcagggtctctgacaggt

SEQ ID NO: 139357 - DNA, 20 bp, Artificial Sequence
  mmSKRIPTE0010136_Ighv5-12-4_1
  gRNA
atcatgagtggcatcagact

SEQ ID NO: 139358 - DNA, 20 bp, Artificial Sequence
  mmSKRIPTE0010137_Ighv5-12-4_2
  gRNA
ttggcacccaggatgagcag

SEQ ID NO: 139359 - DNA, 20 bp, Artificial Sequence
  mmSKRIPTE0010138_Ighv5-12-4_3
  gRNA
gctgagcccgaagttcatag

SEQ ID NO: 139360 - DNA, 20 bp, Artificial Sequence
  mmSKRIPTE0010139_Ighv5-12-4_4
  gRNA
aatgaccagtctgaagtcag

SEQ ID NO: 139361 - DNA, 20 bp, Artificial Sequence
  mmSKRIPTE0010140_Ighv5-12-4_5
  gRNA
ctgggaatcgaatccatgat

SEQ ID NO: 139362 - DNA, 20 bp, Artificial Sequence
  mmSKRIPTE0010141_Ighv5-12-4_6
  gRNA
aaggttgggtacaattgtac

SEQ ID NO: 139363 - DNA, 20 bp, Artificial Sequence
  mmSKRIPTE0010142_Ighv5-12-4_7
  gRNA
gagagtttcagggactgtcc

SEQ ID NO: 139364 - DNA, 20 bp, Artificial Sequence
  mmSKRIPTE0010143_Ifnb1_1
  gRNA
cctgtgctatttataaggga

SEQ ID NO: 139365 - DNA, 20 bp, Artificial Sequence
  mmSKRIPTE0010144_Ifnb1_2
  gRNA
cggctgctacctgcaagatg

SEQ ID NO: 139366 - DNA, 20 bp, Artificial Sequence
  mmSKRIPTE0010145_Ifnb1_3
  gRNA
gtacaacagctacgcctgga

SEQ ID NO: 139367 - DNA, 20 bp, Artificial Sequence
  mmSKRIPTE0010146_Ifnb1_4
  gRNA
gacgaacattcggaaatgtc

SEQ ID NO: 139368 - DNA, 20 bp, Artificial Sequence
  mmSKRIPTE0010147_Ifnb1_5
  gRNA
tgaagtccgccctgtaggtg

SEQ ID NO: 139369 - DNA, 20 bp, Artificial Sequence
  mmSKRIPTE0010148_Ifnb1_6
  gRNA
tccagtaatagctcttcaag

SEQ ID NO: 139370 - DNA, 20 bp, Artificial Sequence
  mmSKRIPTE0010149_Ifnb1_7
  gRNA
caacctttaagcatcagagg

SEQ ID NO: 139371 - DNA, 20 bp, Artificial Sequence
  mmSKRIPTE0010150_Ifnb1_8
  gRNA
gtttctgaagacagtactag

SEQ ID NO: 139372 - DNA, 20 bp, Artificial Sequence
  mmSKRIPTE0010151_Ifnb1_9
  gRNA
gctgcttatagttgatggag

SEQ ID NO: 139373 - DNA, 20 bp, Artificial Sequence
  mmSKRIPTE0010152_Gm7030_1
  gRNA
tgcatatcctggatagtgtg

SEQ ID NO: 139374 - DNA, 20 bp, Artificial Sequence
  mmSKRIPTE0010153_Gm7030_2
  gRNA
agagtgtgggtgcataactg

SEQ ID NO: 139375 - DNA, 20 bp, Artificial Sequence
  mmSKRIPTE0010154_Gm7030_3
  gRNA
tccatcctcagactctaaca

SEQ ID NO: 139376 - DNA, 20 bp, Artificial Sequence
  mmSKRIPTE0010155_Gm7030_4
  gRNA
tcttgacccagtatccagag

SEQ ID NO: 139377 - DNA, 20 bp, Artificial Sequence
  mmSKRIPTE0010156_Gm7030_5
  gRNA
actctgtcctgaccagctca

SEQ ID NO: 139378 - DNA, 20 bp, Artificial Sequence
  mmSKRIPTE0010157_Gm7030_6
  gRNA
atgagagtcctggagaacct

SEQ ID NO: 139379 - DNA, 20 bp, Artificial Sequence
  mmSKRIPTE0010158_Gm7030_7
  gRNA
gatcaatcccatggaggcat

SEQ ID NO: 139380 - DNA, 20 bp, Artificial Sequence
  mmSKRIPTE0010159_Gm7030_8
  gRNA
aacctcctctcaatgggcct

SEQ ID NO: 139381 - DNA, 20 bp, Artificial Sequence
  mmSKRIPTE0010160_Gm7030_9
  gRNA
aaccggggctcccctaagcc

SEQ ID NO: 139382 - DNA, 20 bp, Artificial Sequence
  mmSKRIPTE0010161_Ighv1-7_1
  gRNA
acctgctattactgacaaca

SEQ ID NO: 139383 - DNA, 20 bp, Artificial Sequence
  mmSKRIPTE0010162_Ighv1-7_2
  gRNA
ttcagaaaagactaacctgt

SEQ ID NO: 139384 - DNA, 20 bp, Artificial Sequence
  mmSKRIPTE0010163_Ighv1-7_3
  gRNA
gtgcatccagtagctagtaa

SEQ ID NO: 139385 - DNA, 20 bp, Artificial Sequence
  mmSKRIPTE0010164_Ighv1-7_4
  gRNA
ggctgaactggcaaaacctg

SEQ ID NO: 139386 - DNA, 20 bp, Artificial Sequence
  mmSKRIPTE0010165_Ighv1-7_5
  gRNA
gtacttggacctcagcaccc

SEQ ID NO: 139387 - DNA, 20 bp, Artificial Sequence
  mmSKRIPTE0010166_Ighv1-7_6
  gRNA
agcaaggtacctcttagata

SEQ ID NO: 139388 - DNA, 20 bp, Artificial Sequence
  mmSKRIPTE0010167_Ifna11_1
  gRNA
tcatcactatcaagatcatg

SEQ ID NO: 139389 - DNA, 20 bp, Artificial Sequence
  mmSKRIPTE0010168_Ifna11_2
  gRNA
caaggggagggtatttacaa

SEQ ID NO: 139390 - DNA, 20 bp, Artificial Sequence
  mmSKRIPTE0010169_Ifna11_3
  gRNA
ttgagtcctgagaccaagtg

SEQ ID NO: 139391 - DNA, 20 bp, Artificial Sequence
  mmSKRIPTE0010170_Ifna11_4
  gRNA
aggtcctggcacaaatgagg

SEQ ID NO: 139392 - DNA, 20 bp, Artificial Sequence
  mmSKRIPTE0010171_Ifna11_5
  gRNA
ctgcaagacccataatggct

SEQ ID NO: 139393 - DNA, 20 bp, Artificial Sequence
  mmSKRIPTE0010172_Ifna11_6
  gRNA
taacaaataggtgcggatac

SEQ ID NO: 139394 - DNA, 20 bp, Artificial Sequence
  mmSKRIPTE0010173_Ifna11_7
  gRNA
cttgaacctcttcgcatcaa

SEQ ID NO: 139395 - DNA, 20 bp, Artificial Sequence
  mmSKRIPTE0010174_Ifna11_8
  gRNA
cacccctctttcctgcctaa

SEQ ID NO: 139396 - DNA, 20 bp, Artificial Sequence
  mmSKRIPTE0010175_Ifna11_9
  gRNA
agtaggcttgtcagagaacc

SEQ ID NO: 139397 - DNA, 20 bp, Artificial Sequence
  mmSKRIPTE0010176_Ighv3-8_1
  gRNA
atggaaacactcacccggaa

SEQ ID NO: 139398 - DNA, 20 bp, Artificial Sequence
  mmSKRIPTE0010177_Ighv3-8_2
  gRNA
actggatccggaaattccca

SEQ ID NO: 139399 - DNA, 20 bp, Artificial Sequence
  mmSKRIPTE0010178_Ighv3-8_3
  gRNA
gataggaactgccatagaca

SEQ ID NO: 139400 - DNA, 20 bp, Artificial Sequence
  mmSKRIPTE0010179_Ighv3-8_4
  gRNA
ctttaccttcataattggag

SEQ ID NO: 139401 - DNA, 20 bp, Artificial Sequence
  mmSKRIPTE0010180_Ighv3-8_5
  gRNA
gtctgaaggtatcctgtcag

SEQ ID NO: 139402 - DNA, 20 bp, Artificial Sequence
  mmSKRIPTE0010181_Ighv3-8_6
  gRNA
aaagagtattagtgggctct

SEQ ID NO: 139403 - DNA, 20 bp, Artificial Sequence
  mmSKRIPTE0010182_Ighv3-8_7
  gRNA
ggaataaacttgagtacatg

SEQ ID NO: 139404 - DNA, 20 bp, Artificial Sequence
  mmSKRIPTE0010183_Ighv3-8_8
  gRNA
agtgtgtcttcctgtacagc

SEQ ID NO: 139405 - DNA, 20 bp, Artificial Sequence
  mmSKRIPTE0010184_Ighv3-8_9
  gRNA
tcaattattgcccaaaattg

SEQ ID NO: 139406 - DNA, 20 bp, Artificial Sequence
  mmSKRIPTE0010185_Iglc3_1
  gRNA
ggaaatcagacacacgagtg

SEQ ID NO: 139407 - DNA, 20 bp, Artificial Sequence
  mmSKRIPTE0010186_Iglc3_2
  gRNA
acctttgaatctacaatgtg

SEQ ID NO: 139408 - DNA, 20 bp, Artificial Sequence
  mmSKRIPTE0010187_Iglc3_3
  gRNA
tttacatctgaaacatactg

SEQ ID NO: 139409 - DNA, 20 bp, Artificial Sequence
  mmSKRIPTE0010188_Iglc3_4
  gRNA
cctaggaaccctgcagctgt

SEQ ID NO: 139410 - DNA, 20 bp, Artificial Sequence
  mmSKRIPTE0010189_Iglc3_5
  gRNA
tagagaagagaccccactct

SEQ ID NO: 139411 - DNA, 20 bp, Artificial Sequence
  mmSKRIPTE0010190_Iglc3_6
  gRNA
ggccactgtcacaccacttg

SEQ ID NO: 139412 - DNA, 20 bp, Artificial Sequence
  mmSKRIPTE0010191_Iglc3_7
  gRNA
cccttcatgtgtaacttggc

SEQ ID NO: 139413 - DNA, 20 bp, Artificial Sequence
  mmSKRIPTE0010192_Iglc3_8
  gRNA
cagggcaaaggtcactgttg

SEQ ID NO: 139414 - DNA, 20 bp, Artificial Sequence
  mmSKRIPTE0010193_Iglc3_9
  gRNA
ggtggaaacatggtgagtgt

SEQ ID NO: 139415 - DNA, 20 bp, Artificial Sequence
  mmSKRIPTE0010194_Cd24a_1
  gRNA
gactggagagtgtaattcag

SEQ ID NO: 139416 - DNA, 20 bp, Artificial Sequence
  mmSKRIPTE0010195_Cd24a_2
  gRNA
atatggtaacagccaattcg

SEQ ID NO: 139417 - DNA, 20 bp, Artificial Sequence
  mmSKRIPTE0010196_Cd24a_3
  gRNA
ataatagtctctgtagctgc

SEQ ID NO: 139418 - DNA, 20 bp, Artificial Sequence
  mmSKRIPTE0010197_Cd24a_4
  gRNA
atattctggttaccgggaaa

SEQ ID NO: 139419 - DNA, 20 bp, Artificial Sequence
  mmSKRIPTE0010198_Cd24a_5
  gRNA
agtgcaaatggagatagctg

SEQ ID NO: 139420 - DNA, 20 bp, Artificial Sequence
  mmSKRIPTE0010199_Cd24a_6
  gRNA
aatttaataccgtaagctct

SEQ ID NO: 139421 - DNA, 20 bp, Artificial Sequence
  mmSKRIPTE0010200_Cd24a_7
  gRNA
cccggtatataaggtcccgc

SEQ ID NO: 139422 - DNA, 20 bp, Artificial Sequence
  mmSKRIPTE0010201_Cd24a_8
  gRNA
tgcaggtagaagccaaacac

SEQ ID NO: 139423 - DNA, 20 bp, Artificial Sequence
  mmSKRIPTE0010202_Cd24a_9
  gRNA
ccagtgcccaatcgagaaca

SEQ ID NO: 139424 - DNA, 20 bp, Artificial Sequence
  mmSKRIPTE0010203_Ighv5-2_1
  gRNA
gcggacccaagacatgtcat

SEQ ID NO: 139425 - DNA, 20 bp, Artificial Sequence
  mmSKRIPTE0010204_Ighv5-2_2
  gRNA
gatgatgaatcgtctctcca

SEQ ID NO: 139426 - DNA, 20 bp, Artificial Sequence
  mmSKRIPTE0010205_Ighv5-2_3
  gRNA
ttatatctatgatgatcact

SEQ ID NO: 139427 - DNA, 20 bp, Artificial Sequence
  mmSKRIPTE0010206_Ighv5-2_4
  gRNA
gtcgcagccattaatagtga

SEQ ID NO: 139428 - DNA, 20 bp, Artificial Sequence
  mmSKRIPTE0010207_Ighv5-2_5
  gRNA
cacctgcaaacaaagagtgc

SEQ ID NO: 139429 - DNA, 20 bp, Artificial Sequence
  mmSKRIPTE0010208_Ighv5-2_6
  gRNA
ctgacagagaagctcagccc

SEQ ID NO: 139430 - DNA, 20 bp, Artificial Sequence
  mmSKRIPTE0010209_Ighv5-2_7
  gRNA
ggtcctgctatagcatgctc

SEQ ID NO: 139431 - DNA, 20 bp, Artificial Sequence
  mmSKRIPTE0010210_H2-Q8_1
  gRNA
caccgggaaccaatcagcgt

SEQ ID NO: 139432 - DNA, 20 bp, Artificial Sequence
  mmSKRIPTE0010211_H2-Q8_2
  gRNA
agtcgacctgaatccccgag

SEQ ID NO: 139433 - DNA, 20 bp, Artificial Sequence
  mmSKRIPTE0010212_H2-Q8_3
  gRNA
taatgaaccggggctccacg

SEQ ID NO: 139434 - DNA, 20 bp, Artificial Sequence
  mmSKRIPTE0010213_H2-Q8_4
  gRNA
caggggcatcacccagctga

SEQ ID NO: 139435 - DNA, 20 bp, Artificial Sequence
  mmSKRIPTE0010214_H2-Q8_5
  gRNA
acagatcaccctacacaagt

SEQ ID NO: 139436 - DNA, 20 bp, Artificial Sequence
  mmSKRIPTE0010215_H2-Q8_6
  gRNA
agagaccgggcctacctgga

SEQ ID NO: 139437 - DNA, 20 bp, Artificial Sequence
  mmSKRIPTE0010216_H2-Q8_7
  gRNA
tcactcggaaactctcctca

SEQ ID NO: 139438 - DNA, 20 bp, Artificial Sequence
  mmSKRIPTE0010217_Ddx17_1
  gRNA
ccacatcttccacgtcaatg

SEQ ID NO: 139439 - DNA, 20 bp, Artificial Sequence
  mmSKRIPTE0010218_Ddx17_2
  gRNA
gcggtgcgagaaccctacgc

SEQ ID NO: 139440 - DNA, 20 bp, Artificial Sequence
  mmSKRIPTE0010219_Ddx17_3
  gRNA
tgcgtagcgttaagttggag

SEQ ID NO: 139441 - DNA, 20 bp, Artificial Sequence
  mmSKRIPTE0010220_Ddx17_4
  gRNA
tctccgtcaccgacgtaaag

SEQ ID NO: 139442 - DNA, 20 bp, Artificial Sequence
  mmSKRIPTE0010221_Ddx17_5
  gRNA
aagagtacgtgcatttacgg

SEQ ID NO: 139443 - DNA, 20 bp, Artificial Sequence
  mmSKRIPTE0010222_Ddx17_6
  gRNA
ccacggatgtagcctcccgt

SEQ ID NO: 139444 - DNA, 20 bp, Artificial Sequence
  mmSKRIPTE0010223_Ddx17_7
  gRNA
attcccagataacacccggg

SEQ ID NO: 139445 - DNA, 20 bp, Artificial Sequence
  mmSKRIPTE0010224_Ddx17_8
  gRNA
tggtcggcccaccttaaaca

SEQ ID NO: 139446 - DNA, 20 bp, Artificial Sequence
  mmSKRIPTE0010225_Ddx17_9
  gRNA
atgcagcttgtggaccacag

SEQ ID NO: 139447 - DNA, 20 bp, Artificial Sequence
  mmSKRIPTE0010226_Ighv2-6_1
  gRNA
ctggtagtgatatggagtga

SEQ ID NO: 139448 - DNA, 20 bp, Artificial Sequence
  mmSKRIPTE0010227_Ighv2-6_2
  gRNA
agcaaccttctgtcaccagg

SEQ ID NO: 139449 - DNA, 20 bp, Artificial Sequence
  mmSKRIPTE0010228_Ighv2-6_3
  gRNA
ccatcacatgcaccgtctca

SEQ ID NO: 139450 - DNA, 20 bp, Artificial Sequence
  mmSKRIPTE0010229_Ighv2-6_4
  gRNA
gggggcgctgaggacccaaa

SEQ ID NO: 139451 - DNA, 20 bp, Artificial Sequence
  mmSKRIPTE0010230_Ighv2-6_5
  gRNA
acatggctgtgtcatcagtt

SEQ ID NO: 139452 - DNA, 20 bp, Artificial Sequence
  mmSKRIPTE0010231_Gm13271_1
  gRNA
atgctgaagcctgatcatag

SEQ ID NO: 139453 - DNA, 20 bp, Artificial Sequence
  mmSKRIPTE0010232_Gm13271_2
  gRNA
gatgcttcggggcacgagca

SEQ ID NO: 139454 - DNA, 20 bp, Artificial Sequence
  mmSKRIPTE0010233_Gm13271_3
  gRNA
cagaagaaatgggtgtgcat

SEQ ID NO: 139455 - DNA, 20 bp, Artificial Sequence
  mmSKRIPTE0010234_Gm13271_4
  gRNA
agagtttacttagagctcct

SEQ ID NO: 139456 - DNA, 20 bp, Artificial Sequence
  mmSKRIPTE0010235_Gm13271_5
  gRNA
gatgaggagatggcccgtgc

SEQ ID NO: 139457 - DNA, 20 bp, Artificial Sequence
  mmSKRIPTE0010236_Gm13271_6
  gRNA
ccctctagagcaccatctgc

SEQ ID NO: 139458 - DNA, 20 bp, Artificial Sequence
  mmSKRIPTE0010237_Gm13271_7
  gRNA
cggagctctgctaggaagcg

SEQ ID NO: 139459 - DNA, 20 bp, Artificial Sequence
  mmSKRIPTE0010238_Gm13271_8
  gRNA
gagacatccattgctgcacc

SEQ ID NO: 139460 - DNA, 20 bp, Artificial Sequence
  mmSKRIPTE0010239_Gm13271_9
  gRNA
gattcagccccagaagaaat

SEQ ID NO: 139461 - DNA, 20 bp, Artificial Sequence
  mmSKRIPTE0010240_Ighv2-9_1
  gRNA
taaaagccaaggcctagctg

SEQ ID NO: 139462 - DNA, 20 bp, Artificial Sequence
  mmSKRIPTE0010241_Ighv2-9_2
  gRNA
ctctgatgggggctctagtg

SEQ ID NO: 139463 - DNA, 20 bp, Artificial Sequence
  mmSKRIPTE0010242_Ighv2-9_3
  gRNA
tgatgatattgcttgtcccc

SEQ ID NO: 139464 - DNA, 20 bp, Artificial Sequence
  mmSKRIPTE0010243_Ighv2-9_4
  gRNA
agaaccaagaagttcttccc

SEQ ID NO: 139465 - DNA, 20 bp, Artificial Sequence
  mmSKRIPTE0010244_Ighv2-9_5
  gRNA
cagaggtaatctcaggcaca

SEQ ID NO: 139466 - DNA, 20 bp, Artificial Sequence
  mmSKRIPTE0010245_Ighv2-9_6
  gRNA
aacacaggttcacatagcat

SEQ ID NO: 139467 - DNA, 20 bp, Artificial Sequence
  mmSKRIPTE0010246_Ighv2-9_7
  gRNA
tcctgagcatccttgtaggg

SEQ ID NO: 139468 - DNA, 20 bp, Artificial Sequence
  mmSKRIPTE0010247_Ighv2-9_8
  gRNA
tacagcttggaaatgcaacc

SEQ ID NO: 139469 - DNA, 20 bp, Artificial Sequence
  mmSKRIPTE0010248_Ighv2-9_9
  gRNA
caaagggctactttgcattg

SEQ ID NO: 139470 - DNA, 20 bp, Artificial Sequence
  mmSKRIPTE0010249_Ighv1-64_1
  gRNA
ccaagtcctaatcttgtccg

SEQ ID NO: 139471 - DNA, 20 bp, Artificial Sequence
  mmSKRIPTE0010250_Ighv1-64_2
  gRNA
ttcttctccagcaggagtag

SEQ ID NO: 139472 - DNA, 20 bp, Artificial Sequence
  mmSKRIPTE0010251_Ighv1-64_3
  gRNA
agaaaaacggactatctgaa

SEQ ID NO: 139473 - DNA, 20 bp, Artificial Sequence
  mmSKRIPTE0010252_Ighv1-64_4
  gRNA
gaggggtaacaaactgccct

SEQ ID NO: 139474 - DNA, 20 bp, Artificial Sequence
  mmSKRIPTE0010253_Ighv1-64_5
  gRNA
ggaatgattcatcctaatag

SEQ ID NO: 139475 - DNA, 20 bp, Artificial Sequence
  mmSKRIPTE0010254_Ifna16_1
  gRNA
atggtcttcagaagacctag

SEQ ID NO: 139476 - DNA, 20 bp, Artificial Sequence
  mmSKRIPTE0010255_Ifna16_2
  gRNA
agccatccctgtcctaagtg

SEQ ID NO: 139477 - DNA, 20 bp, Artificial Sequence
  mmSKRIPTE0010256_Ifna16_3
  gRNA
catttgtatcaagagtgtca

SEQ ID NO: 139478 - DNA, 20 bp, Artificial Sequence
  mmSKRIPTE0010257_Ifna16_4
  gRNA
gacaattggaaagttagagg

SEQ ID NO: 139479 - DNA, 20 bp, Artificial Sequence
  mmSKRIPTE0010258_Ifna16_5
  gRNA
ttctggctgtgatgagctac

SEQ ID NO: 139480 - DNA, 20 bp, Artificial Sequence
  mmSKRIPTE0010259_Ifna16_6
  gRNA
attacaaaatgtatctagga

SEQ ID NO: 139481 - DNA, 20 bp, Artificial Sequence
  mmSKRIPTE0010260_Ifna16_7
  gRNA
gcaagcctgtctagtgcagc

SEQ ID NO: 139482 - DNA, 20 bp, Artificial Sequence
  mmSKRIPTE0010261_Ifna16_8
  gRNA
cagggtatccaccttctcct

SEQ ID NO: 139483 - DNA, 20 bp, Artificial Sequence
  mmSKRIPTE0010262_Ifna16_9
  gRNA
ttctttactgaaaagctcag

SEQ ID NO: 139484 - DNA, 20 bp, Artificial Sequence
  mmSKRIPTE0010263_Ighv8-12_1
  gRNA
tgagtgccaaggctccgtaa

SEQ ID NO: 139485 - DNA, 20 bp, Artificial Sequence
  mmSKRIPTE0010264_Ighv8-12_2
  gRNA
taacatattaataaggacct

SEQ ID NO: 139486 - DNA, 20 bp, Artificial Sequence
  mmSKRIPTE0010265_Ighv8-12_3
  gRNA
aaggggtatgagtctatgat

SEQ ID NO: 139487 - DNA, 20 bp, Artificial Sequence
  mmSKRIPTE0010266_Ighv8-12_4
  gRNA
caaggatacctccagaaacc

SEQ ID NO: 139488 - DNA, 20 bp, Artificial Sequence
  mmSKRIPTE0010267_Ighv8-12_5
  gRNA
gagatttgcattcccgcctc

SEQ ID NO: 139489 - DNA, 20 bp, Artificial Sequence
  mmSKRIPTE0010268_Ifna9_1
  gRNA
taagacacatctacatagga

SEQ ID NO: 139490 - DNA, 20 bp, Artificial Sequence
  mmSKRIPTE0010269_Ifna9_2
  gRNA
atgccagaatttgcacagtg

SEQ ID NO: 139491 - DNA, 20 bp, Artificial Sequence
  mmSKRIPTE0010270_Ifna9_3
  gRNA
tcttggtggtgataagctac

SEQ ID NO: 139492 - DNA, 20 bp, Artificial Sequence
  mmSKRIPTE0010271_Ifna9_4
  gRNA
aagaaagcgaaaagaccagt

SEQ ID NO: 139493 - DNA, 20 bp, Artificial Sequence
  mmSKRIPTE0010272_Ifna9_5
  gRNA
caaagcacattactgcatct

SEQ ID NO: 139494 - DNA, 20 bp, Artificial Sequence
  mmSKRIPTE0010273_Ifna9_6
  gRNA
ggccagtgcagaatgagtct

SEQ ID NO: 139495 - DNA, 20 bp, Artificial Sequence
  mmSKRIPTE0010274_Ifna9_7
  gRNA
cttcaagactcataatggct

SEQ ID NO: 139496 - DNA, 20 bp, Artificial Sequence
  mmSKRIPTE0010275_Ifna9_8
  gRNA
atatttcttcatagccagct

SEQ ID NO: 139497 - DNA, 20 bp, Artificial Sequence
  mmSKRIPTE0010276_Ifna9_9
  gRNA
caaaatggagaggactctcc

SEQ ID NO: 139498 - DNA, 20 bp, Artificial Sequence
  mmSKRIPTE0010277_Ifnl3_1
  gRNA
acactgtggagctgccagtg

SEQ ID NO: 139499 - DNA, 20 bp, Artificial Sequence
  mmSKRIPTE0010278_Ifnl3_2
  gRNA
cctccgggacctcaagtgtg

SEQ ID NO: 139500 - DNA, 20 bp, Artificial Sequence
  mmSKRIPTE0010279_Ifnl3_3
  gRNA
agccaggtgagtcccgagaa

SEQ ID NO: 139501 - DNA, 20 bp, Artificial Sequence
  mmSKRIPTE0010280_Ifnl3_4
  gRNA
agggaacatctgagatgtag

SEQ ID NO: 139502 - DNA, 20 bp, Artificial Sequence
  mmSKRIPTE0010281_Ifnl3_5
  gRNA
agggactcgggtctcccttg

SEQ ID NO: 139503 - DNA, 20 bp, Artificial Sequence
  mmSKRIPTE0010282_Ifnl3_6
  gRNA
caagtggctggagaacactg

SEQ ID NO: 139504 - DNA, 20 bp, Artificial Sequence
  mmSKRIPTE0010283_Ifnl3_7
  gRNA
caaagtggagatcattctaa

SEQ ID NO: 139505 - DNA, 20 bp, Artificial Sequence
  mmSKRIPTE0010284_Ifnl3_8
  gRNA
gagactcacgatggcaccct

SEQ ID NO: 139506 - DNA, 20 bp, Artificial Sequence
  mmSKRIPTE0010285_Ighv3-3_1
  gRNA
gaaaagagggtgtagcctaa

SEQ ID NO: 139507 - DNA, 20 bp, Artificial Sequence
  mmSKRIPTE0010286_Ighv3-3_2
  gRNA
atggcaacactaaccaggaa

SEQ ID NO: 139508 - DNA, 20 bp, Artificial Sequence
  mmSKRIPTE0010287_Ighv3-3_3
  gRNA
ttgccccatacacgtagcac

SEQ ID NO: 139509 - DNA, 20 bp, Artificial Sequence
  mmSKRIPTE0010288_Ighv3-3_4
  gRNA
acgttcgactttcaagagat

SEQ ID NO: 139510 - DNA, 20 bp, Artificial Sequence
  mmSKRIPTE0010289_Ighv3-3_5
  gRNA
gctcatatctttctcactgg

SEQ ID NO: 139511 - DNA, 20 bp, Artificial Sequence
  mmSKRIPTE0010290_Ighv3-3_6
  gRNA
atcgggtacacattctacag

SEQ ID NO: 139512 - DNA, 20 bp, Artificial Sequence
  mmSKRIPTE0010291_Ighv3-3_7
  gRNA
aagcagctctgtaccaccag

SEQ ID NO: 139513 - DNA, 20 bp, Artificial Sequence
  mmSKRIPTE0010292_Ighv3-3_8
  gRNA
ggagaagccagtaacagtgc

SEQ ID NO: 139514 - DNA, 20 bp, Artificial Sequence
  mmSKRIPTE0010293_Ighv3-3_9
  gRNA
gtgtctgagaaggtctcacc

SEQ ID NO: 139515 - DNA, 20 bp, Artificial Sequence
  mmSKRIPTE0010294_Ighv9-2_1
  gRNA
aactccctgtctcatatgtg

SEQ ID NO: 139516 - DNA, 20 bp, Artificial Sequence
  mmSKRIPTE0010295_Ighv9-2_2
  gRNA
agcccctgtgaaaagaacac

SEQ ID NO: 139517 - DNA, 20 bp, Artificial Sequence
  mmSKRIPTE0010296_Ighv9-2_3
  gRNA
ttgaagtcgtcagcatatgt

SEQ ID NO: 139518 - DNA, 20 bp, Artificial Sequence
  mmSKRIPTE0010297_Ighv9-2_4
  gRNA
agcccaagtcttacacatca

SEQ ID NO: 139519 - DNA, 20 bp, Artificial Sequence
  mmSKRIPTE0010298_Ighv9-2_5
  gRNA
catcagaataaagagttcca

SEQ ID NO: 139520 - DNA, 20 bp, Artificial Sequence
  mmSKRIPTE0010299_Ighv5-9-1_1
  gRNA
cgaccctgtagctctgacag

SEQ ID NO: 139521 - DNA, 20 bp, Artificial Sequence
  mmSKRIPTE0010300_Ighv5-9-1_2
  gRNA
agtactcatcactgaacgtg

SEQ ID NO: 139522 - DNA, 20 bp, Artificial Sequence
  mmSKRIPTE0010301_Ighv5-9-1_3
  gRNA
ctaaaacctgcagagcatcc

SEQ ID NO: 139523 - DNA, 20 bp, Artificial Sequence
  mmSKRIPTE0010302_Ighv5-9-1_4
  gRNA
ttgactgtgagttgaagatt

SEQ ID NO: 139524 - DNA, 20 bp, Artificial Sequence
  mmSKRIPTE0010303_Ighv5-9-1_5
  gRNA
acctgcaaacagagaatact

SEQ ID NO: 139525 - DNA, 20 bp, Artificial Sequence
  mmSKRIPTE0010304_Ighv5-9-1_6
  gRNA
accccagagcatggtatagt

SEQ ID NO: 139526 - DNA, 20 bp, Artificial Sequence
  mmSKRIPTE0010305_Ighv4-1_1
  gRNA
aggctgcccagacacatgag

SEQ ID NO: 139527 - DNA, 20 bp, Artificial Sequence
  mmSKRIPTE0010306_Ighv4-1_2
  gRNA
gttgggttcggcgggctcca

SEQ ID NO: 139528 - DNA, 20 bp, Artificial Sequence
  mmSKRIPTE0010307_Ighv4-1_3
  gRNA
tctactaaaatcgattcctg

SEQ ID NO: 139529 - DNA, 20 bp, Artificial Sequence
  mmSKRIPTE0010308_Ighv4-1_4
  gRNA
aaactatgcaccatctctaa

SEQ ID NO: 139530 - DNA, 20 bp, Artificial Sequence
  mmSKRIPTE0010309_Ighv4-1_5
  gRNA
acagaacacaggatcactcc

SEQ ID NO: 139531 - DNA, 20 bp, Artificial Sequence
  mmSKRIPTE0010310_Ighv4-1_6
  gRNA
gcaccaggccacctccagac

SEQ ID NO: 139532 - DNA, 20 bp, Artificial Sequence
  mmSKRIPTE0010311_Ighv4-1_7
  gRNA
ttaaatgtactcatggagtc

SEQ ID NO: 139533 - DNA, 20 bp, Artificial Sequence
  mmSKRIPTE0010312_Iglc2_1
  gRNA
cccacctctcctagccacag

SEQ ID NO: 139534 - DNA, 20 bp, Artificial Sequence
  mmSKRIPTE0010313_Iglc2_2
  gRNA
agctttgaaactacttacct

SEQ ID NO: 139535 - DNA, 20 bp, Artificial Sequence
  mmSKRIPTE0010314_Iglc2_3
  gRNA
aaagtgccaggtaaaaagcg

SEQ ID NO: 139536 - DNA, 20 bp, Artificial Sequence
  mmSKRIPTE0010315_Iglc2_4
  gRNA
ctttgaatttacaatatggg

SEQ ID NO: 139537 - DNA, 20 bp, Artificial Sequence
  mmSKRIPTE0010316_Iglc2_5
  gRNA
ctgggtctctaaaagctgca

SEQ ID NO: 139538 - DNA, 20 bp, Artificial Sequence
  mmSKRIPTE0010317_Iglc2_6
  gRNA
ggaaatcagacacaccagtg

SEQ ID NO: 139539 - DNA, 20 bp, Artificial Sequence
  mmSKRIPTE0010318_Iglc2_7
  gRNA
aagacccttgcaagacaaca

SEQ ID NO: 139540 - DNA, 20 bp, Artificial Sequence
  mmSKRIPTE0010319_Iglc2_8
  gRNA
gacctgtgcgaataaaagaa

SEQ ID NO: 139541 - DNA, 20 bp, Artificial Sequence
  mmSKRIPTE0010320_Iglc2_9
  gRNA
ggccactgtcacaccactcg

SEQ ID NO: 139542 - DNA, 20 bp, Artificial Sequence
  mmSKRIPTE0010321_Ighv1-39_1
  gRNA
tcttaagatcctagtccacc

SEQ ID NO: 139543 - DNA, 20 bp, Artificial Sequence
  mmSKRIPTE0010322_Ighv1-39_2
  gRNA
agttacttgggacaagctgc

SEQ ID NO: 139544 - DNA, 20 bp, Artificial Sequence
  mmSKRIPTE0010323_Ighv1-39_3
  gRNA
ctaagtcttgtcagttctaa

SEQ ID NO: 139545 - DNA, 20 bp, Artificial Sequence
  mmSKRIPTE0010324_Ighv1-39_4
  gRNA
ctagacatatgttgatttca

SEQ ID NO: 139546 - DNA, 20 bp, Artificial Sequence
  mmSKRIPTE0010325_Ighv1-39_5
  gRNA
tgtaggctgtgctggaagat

SEQ ID NO: 139547 - DNA, 20 bp, Artificial Sequence
  mmSKRIPTE0010326_Ncor1_1
  gRNA
aacacggaggacggtaacca

SEQ ID NO: 139548 - DNA, 20 bp, Artificial Sequence
  mmSKRIPTE0010327_Ncor1_2
  gRNA
ctggatccaagtgcgtgggt

SEQ ID NO: 139549 - DNA, 20 bp, Artificial Sequence
  mmSKRIPTE0010328_Ncor1_3
  gRNA
gcttcccagcttacattgag

SEQ ID NO: 139550 - DNA, 20 bp, Artificial Sequence
  mmSKRIPTE0010329_Ncor1_4
  gRNA
ctcaggactaacgacaacac

SEQ ID NO: 139551 - DNA, 20 bp, Artificial Sequence
  mmSKRIPTE0010330_Ncor1_5
  gRNA
aagaagaataaattggcatg

SEQ ID NO: 139552 - DNA, 20 bp, Artificial Sequence
  mmSKRIPTE0010331_Ncor1_6
  gRNA
caacatgggagacgtatcgt

SEQ ID NO: 139553 - DNA, 20 bp, Artificial Sequence
  mmSKRIPTE0010332_Ncor1_7
  gRNA
gaacttgtattgtggagtag

SEQ ID NO: 139554 - DNA, 20 bp, Artificial Sequence
  mmSKRIPTE0010333_Ncor1_8
  gRNA
cttaaagggtctcaagacca

SEQ ID NO: 139555 - DNA, 20 bp, Artificial Sequence
  mmSKRIPTE0010334_Ncor1_9
  gRNA
gttcaatccctaggataagt

SEQ ID NO: 139556 - DNA, 20 bp, Artificial Sequence
  mmSKRIPTE0010335_Ifna14_1
  gRNA
agatggcagtctgagcagtg

SEQ ID NO: 139557 - DNA, 20 bp, Artificial Sequence
  mmSKRIPTE0010336_Ifna14_2
  gRNA
actcagctcaatgacctgca

SEQ ID NO: 139558 - DNA, 20 bp, Artificial Sequence
  mmSKRIPTE0010337_Ifna14_3
  gRNA
caaagtggaaaggactctcc

SEQ ID NO: 139559 - DNA, 20 bp, Artificial Sequence
  mmSKRIPTE0010338_Ifna14_4
  gRNA
tgacacttctggtaaaaatg

SEQ ID NO: 139560 - DNA, 20 bp, Artificial Sequence
  mmSKRIPTE0010339_Ifna14_5
  gRNA
gtggatcttgcagatgtcgc

SEQ ID NO: 139561 - DNA, 20 bp, Artificial Sequence
  mmSKRIPTE0010340_Ifna14_6
  gRNA
acaggcacctcccctgaccc

SEQ ID NO: 139562 - DNA, 20 bp, Artificial Sequence
  mmSKRIPTE0010341_Ifna14_7
  gRNA
gctggtcagcaacttggctg

SEQ ID NO: 139563 - DNA, 20 bp, Artificial Sequence
  mmSKRIPTE0010342_Ifna14_8
  gRNA
gcgggaatccaaagtccttc

SEQ ID NO: 139564 - DNA, 20 bp, Artificial Sequence
  mmSKRIPTE0010343_Ighv8-8_1
  gRNA
tgagtgccaaatcttcctaa

SEQ ID NO: 139565 - DNA, 20 bp, Artificial Sequence
  mmSKRIPTE0010344_Ighv8-8_2
  gRNA
attcctcaagatcgccaatg

SEQ ID NO: 139566 - DNA, 20 bp, Artificial Sequence
  mmSKRIPTE0010345_Ighv8-8_3
  gRNA
aacatctaaatagggaccta

SEQ ID NO: 139567 - DNA, 20 bp, Artificial Sequence
  mmSKRIPTE0010346_Ighv8-8_4
  gRNA
tgagccgactcttcagggct

SEQ ID NO: 139568 - DNA, 20 bp, Artificial Sequence
  mmSKRIPTE0010347_Ighv8-8_5
  gRNA
cctttcacctaagagcaaac

SEQ ID NO: 139569 - DNA, 20 bp, Artificial Sequence
  mmSKRIPTE0010348_Ighv16-1_1
  gRNA
agtacacagtctactcaaca

SEQ ID NO: 139570 - DNA, 20 bp, Artificial Sequence
  mmSKRIPTE0010349_Ighv16-1_2
  gRNA
gtcctgagctccttgtggag

SEQ ID NO: 139571 - DNA, 20 bp, Artificial Sequence
  mmSKRIPTE0010350_Ighv16-1_3
  gRNA
ccattctagcctcatgcctg

SEQ ID NO: 139572 - DNA, 20 bp, Artificial Sequence
  mmSKRIPTE0010351_Ighv16-1_4
  gRNA
cagtctgagaaacgaagaca

SEQ ID NO: 139573 - DNA, 20 bp, Artificial Sequence
  mmSKRIPTE0010352_Ighv16-1_5
  gRNA
gacgtgagtaaaagagtcag

SEQ ID NO: 139574 - DNA, 20 bp, Artificial Sequence
  mmSKRIPTE0010353_Ighv16-1_6
  gRNA
aatcactgaataggaagacc

SEQ ID NO: 139575 - DNA, 20 bp, Artificial Sequence
  mmSKRIPTE0010354_Ighv16-1_7
  gRNA
cactttcagtgatcattgga

SEQ ID NO: 139576 - DNA, 20 bp, Artificial Sequence
  mmSKRIPTE0010355_Ighv16-1_8
  gRNA
gagagtttagtggaccctcc

SEQ ID NO: 139577 - DNA, 20 bp, Artificial Sequence
  mmSKRIPTE0010356_Ighv16-1_9
  gRNA
aatacaaaccatgatgagag

SEQ ID NO: 139578 - DNA, 20 bp, Artificial Sequence
  mmSKRIPTE0010357_Ighv1-67_1
  gRNA
gtcatgcaaagagtctagag

SEQ ID NO: 139579 - DNA, 20 bp, Artificial Sequence
  mmSKRIPTE0010358_Ighv1-67_2
  gRNA
tcactgattatgctatgcac

SEQ ID NO: 139580 - DNA, 20 bp, Artificial Sequence
  mmSKRIPTE0010359_Ighv1-67_3
  gRNA
ctcagtagtaaatttgaggg

SEQ ID NO: 139581 - DNA, 20 bp, Artificial Sequence
  mmSKRIPTE0010360_Ighv1-67_4
  gRNA
acttgccagactgacatctg

SEQ ID NO: 139582 - DNA, 20 bp, Artificial Sequence
  mmSKRIPTE0010361_Ighv1-67_5
  gRNA
gatgatacagctccaaccga

SEQ ID NO: 139583 - DNA, 20 bp, Artificial Sequence
  mmSKRIPTE0010362_Ighv1-67_6
  gRNA
ctacagtcacaggaatacac

SEQ ID NO: 139584 - DNA, 20 bp, Artificial Sequence
  mmSKRIPTE0010363_Ighv1-67_7
  gRNA
tcagtgaagatttcctgcaa

SEQ ID NO: 139585 - DNA, 20 bp, Artificial Sequence
  mmSKRIPTE0010364_Ighv1-67_8
  gRNA
ctatttctgatcaaatctaa

SEQ ID NO: 139586 - DNA, 20 bp, Artificial Sequence
  mmSKRIPTE0010365_Hamp_1
  gRNA
ggtaaaaaacctagacacct

SEQ ID NO: 139587 - DNA, 20 bp, Artificial Sequence
  mmSKRIPTE0010366_Hamp_2
  gRNA
aatagtggcgccaaacaggc

SEQ ID NO: 139588 - DNA, 20 bp, Artificial Sequence
  mmSKRIPTE0010367_Hamp_3
  gRNA
tgctgtaacaattcccagtg

SEQ ID NO: 139589 - DNA, 20 bp, Artificial Sequence
  mmSKRIPTE0010368_Hamp_4
  gRNA
agaagaggtattgaatcttg

SEQ ID NO: 139590 - DNA, 20 bp, Artificial Sequence
  mmSKRIPTE0010369_Hamp_5
  gRNA
gagggcaggaataaataatg

SEQ ID NO: 139591 - DNA, 20 bp, Artificial Sequence
  mmSKRIPTE0010370_Hamp_6
  gRNA
gtgtcacctacagccagcag

SEQ ID NO: 139592 - DNA, 20 bp, Artificial Sequence
  mmSKRIPTE0010371_Hamp_7
  gRNA
aatgagtcagagcaaaatgg

SEQ ID NO: 139593 - DNA, 20 bp, Artificial Sequence
  mmSKRIPTE0010372_Hamp_8
  gRNA
gctcacctgttgatggagat

SEQ ID NO: 139594 - DNA, 20 bp, Artificial Sequence
  mmSKRIPTE0010373_Hamp_9
  gRNA
ttgcaagccctgctgaggac

SEQ ID NO: 139595 - DNA, 20 bp, Artificial Sequence
  mmSKRIPTE0010374_Ighv5-4_1
  gRNA
ctaggtccaactccggagca

SEQ ID NO: 139596 - DNA, 20 bp, Artificial Sequence
  mmSKRIPTE0010375_Ighv5-4_2
  gRNA
aatgtgaggaactcgaatcc

SEQ ID NO: 139597 - DNA, 20 bp, Artificial Sequence
  mmSKRIPTE0010376_Ighv5-4_3
  gRNA
gtaactaccaccatcactaa

SEQ ID NO: 139598 - DNA, 20 bp, Artificial Sequence
  mmSKRIPTE0010377_Ighv5-4_4
  gRNA
ttcgccagactccggaaaag

SEQ ID NO: 139599 - DNA, 20 bp, Artificial Sequence
  mmSKRIPTE0010378_Ighv5-4_5
  gRNA
ctgatgataacagatatata

SEQ ID NO: 139600 - DNA, 20 bp, Artificial Sequence
  mmSKRIPTE0010379_Ighv2-6-8_1
  gRNA
gcacctgggaaaggatacct

SEQ ID NO: 139601 - DNA, 20 bp, Artificial Sequence
  mmSKRIPTE0010380_Ighv2-6-8_2
  gRNA
gtcactggcacagtagtaca

SEQ ID NO: 139602 - DNA, 20 bp, Artificial Sequence
  mmSKRIPTE0010381_Ighv2-6-8_3
  gRNA
gggggcgctgaggatccaaa

SEQ ID NO: 139603 - DNA, 20 bp, Artificial Sequence
  mmSKRIPTE0010382_Ighv2-6-8_4
  gRNA
gtcagctaatgtgtgactaa

SEQ ID NO: 139604 - DNA, 20 bp, Artificial Sequence
  mmSKRIPTE0010383_Ighv2-6-8_5
  gRNA
agaagcacaaaggtgatcat

SEQ ID NO: 139605 - DNA, 20 bp, Artificial Sequence
  mmSKRIPTE0010384_Ighv6-7_1
  gRNA
accataaagctctcacagag

SEQ ID NO: 139606 - DNA, 20 bp, Artificial Sequence
  mmSKRIPTE0010385_Ighv6-7_2
  gRNA
agaagctttataaggatggg

SEQ ID NO: 139607 - DNA, 20 bp, Artificial Sequence
  mmSKRIPTE0010386_Ighv6-7_3
  gRNA
gagagtttcatggacctccc

SEQ ID NO: 139608 - DNA, 20 bp, Artificial Sequence
  mmSKRIPTE0010387_Ighv6-7_4
  gRNA
cagagtggacatgtaaccca

SEQ ID NO: 139609 - DNA, 20 bp, Artificial Sequence
  mmSKRIPTE0010388_Ighv6-7_5
  gRNA
agaccattaaccatgtactt

SEQ ID NO: 139610 - DNA, 20 bp, Artificial Sequence
  mmSKRIPTE0010389_Ighv6-7_6
  gRNA
taagcagtcaaaatatacag

SEQ ID NO: 139611 - DNA, 20 bp, Artificial Sequence
  mmSKRIPTE0010390_Ighv6-7_7
  gRNA
gttagtaaaagtgaatccag

SEQ ID NO: 139612 - DNA, 20 bp, Artificial Sequence
  mmSKRIPTE0010391_Ighv6-7_8
  gRNA
ctatttcaggaggtcagggg

SEQ ID NO: 139613 - DNA, 20 bp, Artificial Sequence
  mmSKRIPTE0010392_Ighv6-7_9
  gRNA
aaagtgggctcatgataaag

SEQ ID NO: 139614 - DNA, 20 bp, Artificial Sequence
  mmSKRIPTE0010393_H2-T22_1
  gRNA
tagccgacgattatgaacca

SEQ ID NO: 139615 - DNA, 20 bp, Artificial Sequence
  mmSKRIPTE0010394_H2-T22_2
  gRNA
gacaacaccgacagagttgg

SEQ ID NO: 139616 - DNA, 20 bp, Artificial Sequence
  mmSKRIPTE0010395_H2-T22_3
  gRNA
atccccatctcgatctcgag

SEQ ID NO: 139617 - DNA, 20 bp, Artificial Sequence
  mmSKRIPTE0010396_H2-T22_4
  gRNA
ggacaccataatcccacccc

SEQ ID NO: 139618 - DNA, 20 bp, Artificial Sequence
  mmSKRIPTE0010397_H2-T22_5
  gRNA
aagaaaggaagtcatgacgt

SEQ ID NO: 139619 - DNA, 20 bp, Artificial Sequence
  mmSKRIPTE0010398_H2-T22_6
  gRNA
ttgggtgagtgagaccgggg

SEQ ID NO: 139620 - DNA, 20 bp, Artificial Sequence
  mmSKRIPTE0010399_H2-T22_7
  gRNA
ctcgggacagctgaaaaagg

SEQ ID NO: 139621 - DNA, 20 bp, Artificial Sequence
  mmSKRIPTE0010400_H2-T22_8
  gRNA
tacatcctgttacctaagta

SEQ ID NO: 139622 - DNA, 20 bp, Artificial Sequence
  mmSKRIPTE0010401_H2-T22_9
  gRNA
ttcaaaccctcaatgggaca

SEQ ID NO: 139623 - DNA, 20 bp, Artificial Sequence
  mmSKRIPTE0010402_Ifna13_1
  gRNA
tctgtatgagcatgatttgg

SEQ ID NO: 139624 - DNA, 20 bp, Artificial Sequence
  mmSKRIPTE0010403_Ifna13_2
  gRNA
tagggcgtggaacaaaaaag

SEQ ID NO: 139625 - DNA, 20 bp, Artificial Sequence
  mmSKRIPTE0010404_Ifna13_3
  gRNA
aatgccctctaacttcccaa

SEQ ID NO: 139626 - DNA, 20 bp, Artificial Sequence
  mmSKRIPTE0010405_Ifna13_4
  gRNA
cagctcatgaacaaaaggga

SEQ ID NO: 139627 - DNA, 20 bp, Artificial Sequence
  mmSKRIPTE0010406_Ifna13_5
  gRNA
gctgcatcagacaagctttg

SEQ ID NO: 139628 - DNA, 20 bp, Artificial Sequence
  mmSKRIPTE0010407_Ifnl2_1
  gRNA
cacccgggacctcaagtgtg

SEQ ID NO: 139629 - DNA, 20 bp, Artificial Sequence
  mmSKRIPTE0010408_Ifnl2_2
  gRNA
aagagtggagatcattctaa

SEQ ID NO: 139630 - DNA, 20 bp, Artificial Sequence
  mmSKRIPTE0010409_Ifnl2_3
  gRNA
agccaggtgagtcccaagaa

SEQ ID NO: 139631 - DNA, 20 bp, Artificial Sequence
  mmSKRIPTE0010410_Ifnl2_4
  gRNA
tgtccacagtgtgagcccat

SEQ ID NO: 139632 - DNA, 20 bp, Artificial Sequence
  mmSKRIPTE0010411_Ifnl2_5
  gRNA
aggggacatctgagacatag

SEQ ID NO: 139633 - DNA, 20 bp, Artificial Sequence
  mmSKRIPTE0010412_Ifnl2_6
  gRNA
ctgcagggcctggagctatg

SEQ ID NO: 139634 - DNA, 20 bp, Artificial Sequence
  mmSKRIPTE0010413_Ifnl2_7
  gRNA
agaggtgggaactgcacctc

SEQ ID NO: 139635 - DNA, 20 bp, Artificial Sequence
  mmSKRIPTE0010414_Ifnl2_8
  gRNA
gagactcacgatggcatcct

SEQ ID NO: 139636 - DNA, 20 bp, Artificial Sequence
  mmSKRIPTE0010415_Ccl27a_1
  gRNA
ttaacggtccgtttccgggg

SEQ ID NO: 139637 - DNA, 20 bp, Artificial Sequence
  mmSKRIPTE0010416_Ccl27a_2
  gRNA
cctcaatcgcgacatgtccg

SEQ ID NO: 139638 - DNA, 20 bp, Artificial Sequence
  mmSKRIPTE0010417_Ccl27a_3
  gRNA
cggctgcggcgctaaagtca

SEQ ID NO: 139639 - DNA, 20 bp, Artificial Sequence
  mmSKRIPTE0010418_Ccl27a_4
  gRNA
gggataccttcgcattctat

SEQ ID NO: 139640 - DNA, 20 bp, Artificial Sequence
  mmSKRIPTE0010419_Ccl27a_5
  gRNA
tgatggaaggaagcgtaggg

SEQ ID NO: 139641 - DNA, 20 bp, Artificial Sequence
  mmSKRIPTE0010420_Ccl27a_6
  gRNA
ggaactgcaggaggccgatg

SEQ ID NO: 139642 - DNA, 20 bp, Artificial Sequence
  mmSKRIPTE0010421_Ighv5-16_1
  gRNA
agaacattcagaaccagcag

SEQ ID NO: 139643 - DNA, 20 bp, Artificial Sequence
  mmSKRIPTE0010422_Ighv5-16_2
  gRNA
ttacatggcttgggtccgcc

SEQ ID NO: 139644 - DNA, 20 bp, Artificial Sequence
  mmSKRIPTE0010423_Ighv5-16_3
  gRNA
tctgtgttcagtcctgatca

SEQ ID NO: 139645 - DNA, 20 bp, Artificial Sequence
  mmSKRIPTE0010424_Ighv5-16_4
  gRNA
tccagaaaagggtctagaat

SEQ ID NO: 139646 - DNA, 20 bp, Artificial Sequence
  mmSKRIPTE0010425_Ighv5-16_5
  gRNA
ttgccagagctgcagaatca

SEQ ID NO: 139647 - DNA, 20 bp, Artificial Sequence
  mmSKRIPTE0010426_Ighv5-16_6
  gRNA
catgctttgaagtttgactt

SEQ ID NO: 139648 - DNA, 20 bp, Artificial Sequence
  mmSKRIPTE0010427_Ighv5-16_7
  gRNA
ttcaggtcagaaagttcttg

SEQ ID NO: 139649 - DNA, 20 bp, Artificial Sequence
  mmSKRIPTE0010428_Ighv5-16_8
  gRNA
ggttggaatcctctgtctct

SEQ ID NO: 139650 - DNA, 20 bp, Artificial Sequence
  mmSKRIPTE0010429_Ighv5-16_9
  gRNA
ggctgtgcaggagagtttca

SEQ ID NO: 139651 - DNA, 20 bp, Artificial Sequence
  mmSKRIPTE0010430_Ighv9-4_1
  gRNA
gagcctcagaatgttctcag

SEQ ID NO: 139652 - DNA, 20 bp, Artificial Sequence
  mmSKRIPTE0010431_Ighv9-4_2
  gRNA
cagtcttagatatcatggaa

SEQ ID NO: 139653 - DNA, 20 bp, Artificial Sequence
  mmSKRIPTE0010432_Ighv9-4_3
  gRNA
tatccaagcacagatccagt

SEQ ID NO: 139654 - DNA, 20 bp, Artificial Sequence
  mmSKRIPTE0010433_Ighv9-4_4
  gRNA
ggctggataaacacccactc

SEQ ID NO: 139655 - DNA, 20 bp, Artificial Sequence
  mmSKRIPTE0010434_Ighv9-4_5
  gRNA
tcacaactgctggaatgcag

SEQ ID NO: 139656 - DNA, 20 bp, Artificial Sequence
  mmSKRIPTE0010435_Ighv9-4_6
  gRNA
agagtgtccggttagtctca

SEQ ID NO: 139657 - DNA, 20 bp, Artificial Sequence
  mmSKRIPTE0010436_Ighv9-4_7
  gRNA
aaatgctccaatgggaacca

SEQ ID NO: 139658 - DNA, 20 bp, Artificial Sequence
  mmSKRIPTE0010437_Ighv9-4_8
  gRNA
gtatttgtggtccataatga

SEQ ID NO: 139659 - DNA, 20 bp, Artificial Sequence
  mmSKRIPTE0010438_Ighv9-4_9
  gRNA
gataagcaacctcaaaaatg

SEQ ID NO: 139660 - DNA, 20 bp, Artificial Sequence
  mmSKRIPTE0010439_Ifna12_1
  gRNA
atgccagaatttgagcagtg

SEQ ID NO: 139661 - DNA, 20 bp, Artificial Sequence
  mmSKRIPTE0010440_Ifna12_2
  gRNA
ggagagaactgtcatagact

SEQ ID NO: 139662 - DNA, 20 bp, Artificial Sequence
  mmSKRIPTE0010441_Ifna12_3
  gRNA
aatgtcatgtctctctgcaa

SEQ ID NO: 139663 - DNA, 20 bp, Artificial Sequence
  mmSKRIPTE0010442_Ifna12_4
  gRNA
taattactgttgaaacatca

SEQ ID NO: 139664 - DNA, 20 bp, Artificial Sequence
  mmSKRIPTE0010443_Ifna12_5
  gRNA
catattctcttcttgcatct

SEQ ID NO: 139665 - DNA, 20 bp, Artificial Sequence
  mmSKRIPTE0010444_Ifnab_1
  gRNA
aatgactggtatctttgaga

SEQ ID NO: 139666 - DNA, 20 bp, Artificial Sequence
  mmSKRIPTE0010445_Ifnab_2
  gRNA
tccaggagattctctccact

SEQ ID NO: 139667 - DNA, 20 bp, Artificial Sequence
  mmSKRIPTE0010446_Ifnab_3
  gRNA
gaaagtgctgagcctagcca

SEQ ID NO: 139668 - DNA, 20 bp, Artificial Sequence
  mmSKRIPTE0010447_Ifnab_4
  gRNA
accagtagctcatcactgcc

SEQ ID NO: 139669 - DNA, 20 bp, Artificial Sequence
  mmSKRIPTE0010448_Ifnab_5
  gRNA
gaaaacctgtctgatgcagg

SEQ ID NO: 139670 - DNA, 20 bp, Artificial Sequence
  mmSKRIPTE0010449_Ifnab_6
  gRNA
ctgactgggtggatgactga

SEQ ID NO: 139671 - DNA, 20 bp, Artificial Sequence
  mmSKRIPTE0010450_Ifnab_7
  gRNA
gttaatgaaaattcattcag

SEQ ID NO: 139672 - DNA, 20 bp, Artificial Sequence
  mmSKRIPTE0010451_Tsc22d4_1
  gRNA
gacccgtggagtgttaaccg

SEQ ID NO: 139673 - DNA, 20 bp, Artificial Sequence
  mmSKRIPTE0010452_Tsc22d4_2
  gRNA
ccccagaacactgatacccg

SEQ ID NO: 139674 - DNA, 20 bp, Artificial Sequence
  mmSKRIPTE0010453_Tsc22d4_3
  gRNA
cttcaccacccggaaacggg

SEQ ID NO: 139675 - DNA, 20 bp, Artificial Sequence
  mmSKRIPTE0010454_Tsc22d4_4
  gRNA
ggggtcatcccccatccgag

SEQ ID NO: 139676 - DNA, 20 bp, Artificial Sequence
  mmSKRIPTE0010455_Tsc22d4_5
  gRNA
tcagatcaccagcgtcacca

SEQ ID NO: 139677 - DNA, 20 bp, Artificial Sequence
  mmSKRIPTE0010456_Tsc22d4_6
  gRNA
gagagccttatcgtcgaggt

SEQ ID NO: 139678 - DNA, 20 bp, Artificial Sequence
  mmSKRIPTE0010457_Tsc22d4_7
  gRNA
ggacagcgatgacgataggt

SEQ ID NO: 139679 - DNA, 20 bp, Artificial Sequence
  mmSKRIPTE0010458_Tsc22d4_8
  gRNA
tatctgaagcccctcgtccg

SEQ ID NO: 139680 - DNA, 20 bp, Artificial Sequence
  mmSKRIPTE0010459_Tsc22d4_9
  gRNA
cgtccgcatctcactctgcg

SEQ ID NO: 139681 - DNA, 20 bp, Artificial Sequence
  mmSKRIPTE0010460_NTC_1
  gRNA
aaaaagtccgcgattacgtc

SEQ ID NO: 139682 - DNA, 20 bp, Artificial Sequence
  mmSKRIPTE0010461_NTC_2
  gRNA
aaaacggctcgatcggtgat

SEQ ID NO: 139683 - DNA, 20 bp, Artificial Sequence
  mmSKRIPTE0010462_NTC_3
  gRNA
aaaacgtaattataccgagc

SEQ ID NO: 139684 - DNA, 20 bp, Artificial Sequence
  mmSKRIPTE0010463_NTC_4
  gRNA
aaaattgcaccttcccggcc

SEQ ID NO: 139685 - DNA, 20 bp, Artificial Sequence
  mmSKRIPTE0010464_NTC_5
  gRNA
aaacccccgcgcggagcgtc

SEQ ID NO: 139686 - DNA, 20 bp, Artificial Sequence
  mmSKRIPTE0010465_NTC_6
  gRNA
aaacctagcgtagattcggc

SEQ ID NO: 139687 - DNA, 20 bp, Artificial Sequence
  mmSKRIPTE0010466_NTC_7
  gRNA
aaacgaggctgttcgtacac

SEQ ID NO: 139688 - DNA, 20 bp, Artificial Sequence
  mmSKRIPTE0010467_NTC_8
  gRNA
aaactcatacgtagcgaatc

SEQ ID NO: 139689 - DNA, 20 bp, Artificial Sequence
  mmSKRIPTE0010468_NTC_9
  gRNA
aaactcccgtgtcaaccgat

SEQ ID NO: 139690 - DNA, 20 bp, Artificial Sequence
  mmSKRIPTE0010469_NTC_10
  gRNA
aaagacgtgcattcagcgag

SEQ ID NO: 139691 - DNA, 20 bp, Artificial Sequence
  mmSKRIPTE0010470_NTC_11
  gRNA
aacatgttaagtcgcgttat

SEQ ID NO: 139692 - DNA, 20 bp, Artificial Sequence
  mmSKRIPTE0010471_NTC_12
  gRNA
aaccagcatttgaccgcgct

SEQ ID NO: 139693 - DNA, 20 bp, Artificial Sequence
  mmSKRIPTE0010472_NTC_13
  gRNA
aaccccggctgtcatcgccg

SEQ ID NO: 139694 - DNA, 20 bp, Artificial Sequence
  mmSKRIPTE0010473_NTC_14
  gRNA
aacccgccggaacaatcagc

SEQ ID NO: 139695 - DNA, 20 bp, Artificial Sequence
  mmSKRIPTE0010474_NTC_15
  gRNA
aaccggctgcgcgtttgcaa

SEQ ID NO: 139696 - DNA, 20 bp, Artificial Sequence
  mmSKRIPTE0010475_NTC_16
  gRNA
aaccgtactgcgaggagcat

SEQ ID NO: 139697 - DNA, 20 bp, Artificial Sequence
  mmSKRIPTE0010476_NTC_17
  gRNA
aacctcgtctcatgtacgaa

SEQ ID NO: 139698 - DNA, 20 bp, Artificial Sequence
  mmSKRIPTE0010477_NTC_18
  gRNA
aacgccccggatttcgttga

SEQ ID NO: 139699 - DNA, 20 bp, Artificial Sequence
  mmSKRIPTE0010478_NTC_19
  gRNA
aacggctgcgcccgcggcaa

SEQ ID NO: 139700 - DNA, 20 bp, Artificial Sequence
  mmSKRIPTE0010479_NTC_20
  gRNA
aacgggcgcaataccctttt

SEQ ID NO: 139701 - DNA, 20 bp, Artificial Sequence
  mmSKRIPTE0010480_NTC_21
  gRNA
aacggtagcgtacccgtgaa

SEQ ID NO: 139702 - DNA, 20 bp, Artificial Sequence
  mmSKRIPTE0010481_NTC_22
  gRNA
aacggtcaaatccgtgaggg

SEQ ID NO: 139703 - DNA, 20 bp, Artificial Sequence
  mmSKRIPTE0010482_NTC_23
  gRNA
aacgtcaccaacctcgatcc

SEQ ID NO: 139704 - DNA, 20 bp, Artificial Sequence
  mmSKRIPTE0010483_NTC_24
  gRNA
aacgttatagcttcgtctct

SEQ ID NO: 139705 - DNA, 20 bp, Artificial Sequence
  mmSKRIPTE0010484_NTC_25
  gRNA
aactaactcactacgcacga

SEQ ID NO: 139706 - DNA, 20 bp, Artificial Sequence
  mmSKRIPTE0010485_NTC_26
  gRNA
aactcctcatcgtacgctaa

SEQ ID NO: 139707 - DNA, 20 bp, Artificial Sequence
  mmSKRIPTE0010486_NTC_27
  gRNA
aactcgcgtgggaagtccgg

SEQ ID NO: 139708 - DNA, 20 bp, Artificial Sequence
  mmSKRIPTE0010487_NTC_28
  gRNA
aacttatacgtaatctgatc

SEQ ID NO: 139709 - DNA, 20 bp, Artificial Sequence
  mmSKRIPTE0010488_NTC_29
  gRNA
aagactcctacgtatcgagc

SEQ ID NO: 139710 - DNA, 20 bp, Artificial Sequence
  mmSKRIPTE0010489_NTC_30
  gRNA
aagcacaagaacggtccgcc

SEQ ID NO: 139711 - DNA, 20 bp, Artificial Sequence
  mmSKRIPTE0010490_NTC_31
  gRNA
aagcagcgactactcgacgc

SEQ ID NO: 139712 - DNA, 20 bp, Artificial Sequence
  mmSKRIPTE0010491_NTC_32
  gRNA
aagcctaacggagctcgcgg

SEQ ID NO: 139713 - DNA, 20 bp, Artificial Sequence
  mmSKRIPTE0010492_NTC_33
  gRNA
aagcctacttcaccggtcgg

SEQ ID NO: 139714 - DNA, 20 bp, Artificial Sequence
  mmSKRIPTE0010493_NTC_34
  gRNA
aagcgagccgcagaccgttt

SEQ ID NO: 139715 - DNA, 20 bp, Artificial Sequence
  mmSKRIPTE0010494_NTC_35
  gRNA
aagcgtaccccactcgttaa

SEQ ID NO: 139716 - DNA, 20 bp, Artificial Sequence
  mmSKRIPTE0010495_NTC_36
  gRNA
aagcgtgagattcaccgccg

SEQ ID NO: 139717 - DNA, 20 bp, Artificial Sequence
  mmSKRIPTE0010496_NTC_37
  gRNA
aaggccttaacacgtcgacc

SEQ ID NO: 139718 - DNA, 20 bp, Artificial Sequence
  mmSKRIPTE0010497_NTC_38
  gRNA
aaggcgtaaacgagtacacg

SEQ ID NO: 139719 - DNA, 20 bp, Artificial Sequence
  mmSKRIPTE0010498_NTC_39
  gRNA
aagggtaagtacagtatcgt

SEQ ID NO: 139720 - DNA, 20 bp, Artificial Sequence
  mmSKRIPTE0010499_NTC_40
  gRNA
aagtccccttcgggaactcc

SEQ ID NO: 139721 - DNA, 20 bp, Artificial Sequence
  mmSKRIPTE0010500_NTC_41
  gRNA
aagtctatgcggggctcgta

SEQ ID NO: 139722 - DNA, 20 bp, Artificial Sequence
  mmSKRIPTE0010501_NTC_42
  gRNA
aataagcctacccggcgaga

SEQ ID NO: 139723 - DNA, 20 bp, Artificial Sequence
  mmSKRIPTE0010502_NTC_43
  gRNA
aataccgtaccgactcagtg

SEQ ID NO: 139724 - DNA, 20 bp, Artificial Sequence
  mmSKRIPTE0010503_NTC_44
  gRNA
aataggaactccgcacccga

SEQ ID NO: 139725 - DNA, 20 bp, Artificial Sequence
  mmSKRIPTE0010504_NTC_45
  gRNA
aatcaaccgtgatagtctcg

SEQ ID NO: 139726 - DNA, 20 bp, Artificial Sequence
  mmSKRIPTE0010505_NTC_46
  gRNA
aatcaccgacaacgtaagac

SEQ ID NO: 139727 - DNA, 20 bp, Artificial Sequence
  mmSKRIPTE0010506_NTC_47
  gRNA
aatgaagcaccgattgcgga

SEQ ID NO: 139728 - DNA, 20 bp, Artificial Sequence
  mmSKRIPTE0010507_NTC_48
  gRNA
aatgagcgtctctcgatcgc

SEQ ID NO: 139729 - DNA, 20 bp, Artificial Sequence
  mmSKRIPTE0010508_NTC_49
  gRNA
aatgagcttcgagttcgtct

SEQ ID NO: 139730 - DNA, 20 bp, Artificial Sequence
  mmSKRIPTE0010509_NTC_50
  gRNA
aatgctgcgtacgataaccg

SEQ ID NO: 139731 - DNA, 20 bp, Artificial Sequence
  mmSKRIPTE0010510_NTC_51
  gRNA
aattctgagattccgcggct

SEQ ID NO: 139732 - DNA, 20 bp, Artificial Sequence
  mmSKRIPTE0010511_NTC_52
  gRNA
aattgtctgatcgcgccata

SEQ ID NO: 139733 - DNA, 20 bp, Artificial Sequence
  mmSKRIPTE0010512_NTC_53
  gRNA
aattttttcggaatctagcg

SEQ ID NO: 139734 - DNA, 20 bp, Artificial Sequence
  mmSKRIPTE0010513_NTC_54
  gRNA
acaacaattactggccgcga

SEQ ID NO: 139735 - DNA, 20 bp, Artificial Sequence
  mmSKRIPTE0010514_NTC_55
  gRNA
acaacacgccgacacgtcta

SEQ ID NO: 139736 - DNA, 20 bp, Artificial Sequence
  mmSKRIPTE0010515_NTC_56
  gRNA
acaattcggtttatgcgcgt

SEQ ID NO: 139737 - DNA, 20 bp, Artificial Sequence
  mmSKRIPTE0010516_NTC_57
  gRNA
acacaaactggtcgtagatg

SEQ ID NO: 139738 - DNA, 20 bp, Artificial Sequence
  mmSKRIPTE0010517_NTC_58
  gRNA
acacccgtgtatgcaccggg

SEQ ID NO: 139739 - DNA, 20 bp, Artificial Sequence
  mmSKRIPTE0010518_NTC_59
  gRNA
acacgaccgaccggtggaat

SEQ ID NO: 139740 - DNA, 20 bp, Artificial Sequence
  mmSKRIPTE0010519_NTC_60
  gRNA
acacgtcttcggctatacgc

SEQ ID NO: 139741 - DNA, 20 bp, Artificial Sequence
  mmSKRIPTE0010520_NTC_61
  gRNA
acagaccgaataaccgacga

SEQ ID NO: 139742 - DNA, 20 bp, Artificial Sequence
  mmSKRIPTE0010521_NTC_62
  gRNA
acagagtcgtgtgccgaacg

SEQ ID NO: 139743 - DNA, 20 bp, Artificial Sequence
  mmSKRIPTE0010522_NTC_63
  gRNA
acagcaggggccgcgaataa

SEQ ID NO: 139744 - DNA, 20 bp, Artificial Sequence
  mmSKRIPTE0010523_NTC_64
  gRNA
acagcggcctaatacttcgc

SEQ ID NO: 139745 - DNA, 20 bp, Artificial Sequence
  mmSKRIPTE0010524_NTC_65
  gRNA
accaacgctacgatcccgga

SEQ ID NO: 139746 - DNA, 20 bp, Artificial Sequence
  mmSKRIPTE0010525_NTC_66
  gRNA
accaataacgggtacaagtc

SEQ ID NO: 139747 - DNA, 20 bp, Artificial Sequence
  mmSKRIPTE0010526_NTC_67
  gRNA
accaccgtgccggggacgcg

SEQ ID NO: 139748 - DNA, 20 bp, Artificial Sequence
  mmSKRIPTE0010527_NTC_68
  gRNA
accaggactgccgcgtgagg

SEQ ID NO: 139749 - DNA, 20 bp, Artificial Sequence
  mmSKRIPTE0010528_NTC_69
  gRNA
accaggcgcggaccgcacat

SEQ ID NO: 139750 - DNA, 20 bp, Artificial Sequence
  mmSKRIPTE0010529_NTC_70
  gRNA
accatacggggtcttgtcga

SEQ ID NO: 139751 - DNA, 20 bp, Artificial Sequence
  mmSKRIPTE0010530_NTC_71
  gRNA
accatagtttcaacctgcgg

SEQ ID NO: 139752 - DNA, 20 bp, Artificial Sequence
  mmSKRIPTE0010531_NTC_72
  gRNA
accatccgatattacgagca

SEQ ID NO: 139753 - DNA, 20 bp, Artificial Sequence
  mmSKRIPTE0010532_NTC_73
  gRNA
accatgatgtcaccgccgca

SEQ ID NO: 139754 - DNA, 20 bp, Artificial Sequence
  mmSKRIPTE0010533_NTC_74
  gRNA
acccacgtatgtactcggga

SEQ ID NO: 139755 - DNA, 20 bp, Artificial Sequence
  mmSKRIPTE0010534_NTC_75
  gRNA
acccagattcgcattcggat

SEQ ID NO: 139756 - DNA, 20 bp, Artificial Sequence
  mmSKRIPTE0010535_NTC_76
  gRNA
acccatccccgcgtccgaga

SEQ ID NO: 139757 - DNA, 20 bp, Artificial Sequence
  mmSKRIPTE0010536_NTC_77
  gRNA
acccatcgggtgcgatatgg

SEQ ID NO: 139758 - DNA, 20 bp, Artificial Sequence
  mmSKRIPTE0010537_NTC_78
  gRNA
acccgcatatgccgcctaag

SEQ ID NO: 139759 - DNA, 20 bp, Artificial Sequence
  mmSKRIPTE0010538_NTC_79
  gRNA
accctagcctcatcgcgacc

SEQ ID NO: 139760 - DNA, 20 bp, Artificial Sequence
  mmSKRIPTE0010539_NTC_80
  gRNA
accgcacgttctcgcagaga

SEQ ID NO: 139761 - DNA, 20 bp, Artificial Sequence
  mmSKRIPTE0010540_NTC_81
  gRNA
accgcgcatcattgacggtg

SEQ ID NO: 139762 - DNA, 20 bp, Artificial Sequence
  mmSKRIPTE0010541_NTC_82
  gRNA
accggactgcgatatgccgt

SEQ ID NO: 139763 - DNA, 20 bp, Artificial Sequence
  mmSKRIPTE0010542_NTC_83
  gRNA
accggatgtgggcgcctctc

SEQ ID NO: 139764 - DNA, 20 bp, Artificial Sequence
  mmSKRIPTE0010543_NTC_84
  gRNA
accggtcgaagtctgggatt

SEQ ID NO: 139765 - DNA, 20 bp, Artificial Sequence
  mmSKRIPTE0010544_NTC_85
  gRNA
accggttcagccgccggaac

SEQ ID NO: 139766 - DNA, 20 bp, Artificial Sequence
  mmSKRIPTE0010545_NTC_86
  gRNA
accgtacaagactcgctcca

SEQ ID NO: 139767 - DNA, 20 bp, Artificial Sequence
  mmSKRIPTE0010546_NTC_87
  gRNA
accgtctctattatacggca

SEQ ID NO: 139768 - DNA, 20 bp, Artificial Sequence
  mmSKRIPTE0010547_NTC_88
  gRNA
accgtctgatgttcccggct

SEQ ID NO: 139769 - DNA, 20 bp, Artificial Sequence
  mmSKRIPTE0010548_NTC_89
  gRNA
accgttgtttccgtcgaaac

SEQ ID NO: 139770 - DNA, 20 bp, Artificial Sequence
  mmSKRIPTE0010549_NTC_90
  gRNA
acctcgtgcaaatcggtggc

SEQ ID NO: 139771 - DNA, 20 bp, Artificial Sequence
  mmSKRIPTE0010550_NTC_91
  gRNA
accttgtgttcgacggtagg

SEQ ID NO: 139772 - DNA, 20 bp, Artificial Sequence
  mmSKRIPTE0010551_NTC_92
  gRNA
acgacgagagatacttaggc

SEQ ID NO: 139773 - DNA, 20 bp, Artificial Sequence
  mmSKRIPTE0010552_NTC_93
  gRNA
acgacgtccgctgtgtgtat

SEQ ID NO: 139774 - DNA, 20 bp, Artificial Sequence
  mmSKRIPTE0010553_NTC_94
  gRNA
acgaggagaagtcgagtatt

SEQ ID NO: 139775 - DNA, 20 bp, Artificial Sequence
  mmSKRIPTE0010554_NTC_95
  gRNA
acgcaagcggaacgcgtcta

SEQ ID NO: 139776 - DNA, 20 bp, Artificial Sequence
  mmSKRIPTE0010555_NTC_96
  gRNA
acgcacccatacaggcgctt

SEQ ID NO: 139777 - DNA, 20 bp, Artificial Sequence
  mmSKRIPTE0010556_NTC_97
  gRNA
acgcgaagtgtcgcagagtg

SEQ ID NO: 139778 - DNA, 20 bp, Artificial Sequence
  mmSKRIPTE0010557_NTC_98
  gRNA
acgctatagtgtacgtctaa

SEQ ID NO: 139779 - DNA, 20 bp, Artificial Sequence
  mmSKRIPTE0010558_NTC_99
  gRNA
acgctcttggcagataatcg

SEQ ID NO: 139780 - DNA, 20 bp, Artificial Sequence
  mmSKRIPTE0010559_NTC_100
  gRNA
acgctgttcgtaaccgcggg

SEQ ID NO: 139781 - DNA, 20 bp, Artificial Sequence
  mmSKRIPTE0010560_NTC_101
  gRNA
acggaacccgatcggaacgg

SEQ ID NO: 139782 - DNA, 20 bp, Artificial Sequence
  mmSKRIPTE0010561_NTC_102
  gRNA
acggattgctgacgctatca

SEQ ID NO: 139783 - DNA, 20 bp, Artificial Sequence
  mmSKRIPTE0010562_NTC_103
  gRNA
acgggtcaacttcttgccgc

SEQ ID NO: 139784 - DNA, 20 bp, Artificial Sequence
  mmSKRIPTE0010563_NTC_104
  gRNA
acggtcccaacgagcgccgg

SEQ ID NO: 139785 - DNA, 20 bp, Artificial Sequence
  mmSKRIPTE0010564_NTC_105
  gRNA
acggtccctctcgggtcaat

SEQ ID NO: 139786 - DNA, 20 bp, Artificial Sequence
  mmSKRIPTE0010565_NTC_106
  gRNA
acggtcgagcacggttatga

SEQ ID NO: 139787 - DNA, 20 bp, Artificial Sequence
  mmSKRIPTE0010566_NTC_107
  gRNA
acgtcgatgcttatccgtct

SEQ ID NO: 139788 - DNA, 20 bp, Artificial Sequence
  mmSKRIPTE0010567_NTC_108
  gRNA
acgtcggtctagagttaagt

SEQ ID NO: 139789 - DNA, 20 bp, Artificial Sequence
  mmSKRIPTE0010568_NTC_109
  gRNA
acgtgtaaggcgaacgcctt

SEQ ID NO: 139790 - DNA, 20 bp, Artificial Sequence
  mmSKRIPTE0010569_NTC_110
  gRNA
acgtgttctcgtacttagct

SEQ ID NO: 139791 - DNA, 20 bp, Artificial Sequence
  mmSKRIPTE0010570_NTC_111
  gRNA
acgttgcagctcgcgtttcg

SEQ ID NO: 139792 - DNA, 20 bp, Artificial Sequence
  mmSKRIPTE0010571_NTC_112
  gRNA
actaaggagtcccggtccga

SEQ ID NO: 139793 - DNA, 20 bp, Artificial Sequence
  mmSKRIPTE0010572_NTC_113
  gRNA
actagctccataacgtgtac

SEQ ID NO: 139794 - DNA, 20 bp, Artificial Sequence
  mmSKRIPTE0010573_NTC_114
  gRNA
actcacctcgcacgatcgta

SEQ ID NO: 139795 - DNA, 20 bp, Artificial Sequence
  mmSKRIPTE0010574_NTC_115
  gRNA
actcgacctaacgtcgatgt

SEQ ID NO: 139796 - DNA, 20 bp, Artificial Sequence
  mmSKRIPTE0010575_NTC_116
  gRNA
actcgcgaaaccgtacatga

SEQ ID NO: 139797 - DNA, 20 bp, Artificial Sequence
  mmSKRIPTE0010576_NTC_117
  gRNA
actgcgcgtataggacgcaa

SEQ ID NO: 139798 - DNA, 20 bp, Artificial Sequence
  mmSKRIPTE0010577_NTC_118
  gRNA
actgtcccattgtacgacgg

SEQ ID NO: 139799 - DNA, 20 bp, Artificial Sequence
  mmSKRIPTE0010578_NTC_119
  gRNA
acttcccgcggttccgttga

SEQ ID NO: 139800 - DNA, 20 bp, Artificial Sequence
  mmSKRIPTE0010579_NTC_120
  gRNA
acttgtatacgacggctaga

SEQ ID NO: 139801 - DNA, 20 bp, Artificial Sequence
  mmSKRIPTE0010580_NTC_121
  gRNA
actttacatcatgtcgtcgt

SEQ ID NO: 139802 - DNA, 20 bp, Artificial Sequence
  mmSKRIPTE0010581_NTC_122
  gRNA
agaaaggcacgtgcgacgtc

SEQ ID NO: 139803 - DNA, 20 bp, Artificial Sequence
  mmSKRIPTE0010582_NTC_123
  gRNA
agaaatccagtcccgcctaa

SEQ ID NO: 139804 - DNA, 20 bp, Artificial Sequence
  mmSKRIPTE0010583_NTC_124
  gRNA
agacctcgttagccgtagct

SEQ ID NO: 139805 - DNA, 20 bp, Artificial Sequence
  mmSKRIPTE0010584_NTC_125
  gRNA
agacgttgatttaccggcca

SEQ ID NO: 139806 - DNA, 20 bp, Artificial Sequence
  mmSKRIPTE0010585_NTC_126
  gRNA
agactcgtgtgccacgagga

SEQ ID NO: 139807 - DNA, 20 bp, Artificial Sequence
  mmSKRIPTE0010586_NTC_127
  gRNA
agaggcggagcaatactcgc

SEQ ID NO: 139808 - DNA, 20 bp, Artificial Sequence
  mmSKRIPTE0010587_NTC_128
  gRNA
agatagcgcaatcccgcatg

SEQ ID NO: 139809 - DNA, 20 bp, Artificial Sequence
  mmSKRIPTE0010588_NTC_129
  gRNA
agattctcgcgtaaccagag

SEQ ID NO: 139810 - DNA, 20 bp, Artificial Sequence
  mmSKRIPTE0010589_NTC_130
  gRNA
agcacgcgcacaagagccgc

SEQ ID NO: 139811 - DNA, 20 bp, Artificial Sequence
  mmSKRIPTE0010590_NTC_131
  gRNA
agcactaggatcgcggcctt

SEQ ID NO: 139812 - DNA, 20 bp, Artificial Sequence
  mmSKRIPTE0010591_NTC_132
  gRNA
agcagttcgggtaacgccca

SEQ ID NO: 139813 - DNA, 20 bp, Artificial Sequence
  mmSKRIPTE0010592_NTC_133
  gRNA
agcatggagtcaacgtccgc

SEQ ID NO: 139814 - DNA, 20 bp, Artificial Sequence
  mmSKRIPTE0010593_NTC_134
  gRNA
agccgcgccgcaaagctttt

SEQ ID NO: 139815 - DNA, 20 bp, Artificial Sequence
  mmSKRIPTE0010594_NTC_135
  gRNA
agccgggctttccgtcaagc

SEQ ID NO: 139816 - DNA, 20 bp, Artificial Sequence
  mmSKRIPTE0010595_NTC_136
  gRNA
agcctagtcgcgctaatatt

SEQ ID NO: 139817 - DNA, 20 bp, Artificial Sequence
  mmSKRIPTE0010596_NTC_137
  gRNA
agcgagtgtccgtgacgttc

SEQ ID NO: 139818 - DNA, 20 bp, Artificial Sequence
  mmSKRIPTE0010597_NTC_138
  gRNA
agcgatgttcacgcacagcg

SEQ ID NO: 139819 - DNA, 20 bp, Artificial Sequence
  mmSKRIPTE0010598_NTC_139
  gRNA
agcgccataggacgccaaac

SEQ ID NO: 139820 - DNA, 20 bp, Artificial Sequence
  mmSKRIPTE0010599_NTC_140
  gRNA
agcgcgtaaggcgtagttac

SEQ ID NO: 139821 - DNA, 20 bp, Artificial Sequence
  mmSKRIPTE0010600_NTC_141
  gRNA
agcgtatcttatgtaccgct

SEQ ID NO: 139822 - DNA, 20 bp, Artificial Sequence
  mmSKRIPTE0010601_NTC_142
  gRNA
agcgtccacgcgtctatgga

SEQ ID NO: 139823 - DNA, 20 bp, Artificial Sequence
  mmSKRIPTE0010602_NTC_143
  gRNA
agcgtgtcgagaacggcttg

SEQ ID NO: 139824 - DNA, 20 bp, Artificial Sequence
  mmSKRIPTE0010603_NTC_144
  gRNA
agcgttcgcagctggtcaac

SEQ ID NO: 139825 - DNA, 20 bp, Artificial Sequence
  mmSKRIPTE0010604_NTC_145
  gRNA
agctatccccacgttcgcgg

SEQ ID NO: 139826 - DNA, 20 bp, Artificial Sequence
  mmSKRIPTE0010605_NTC_146
  gRNA
agcttagatcgtgcgtcgta

SEQ ID NO: 139827 - DNA, 20 bp, Artificial Sequence
  mmSKRIPTE0010606_NTC_147
  gRNA
aggactatccgcgggattag

SEQ ID NO: 139828 - DNA, 20 bp, Artificial Sequence
  mmSKRIPTE0010607_NTC_148
  gRNA
aggcagcccgcgttagagat

SEQ ID NO: 139829 - DNA, 20 bp, Artificial Sequence
  mmSKRIPTE0010608_NTC_149
  gRNA
aggccccgagacgcgccaca

SEQ ID NO: 139830 - DNA, 20 bp, Artificial Sequence
  mmSKRIPTE0010609_NTC_150
  gRNA
agggcaatcgcgtgcccaac

SEQ ID NO: 139831 - DNA, 20 bp, Artificial Sequence
  mmSKRIPTE0010610_NTC_151
  gRNA
agggttaggctgacccgcga

SEQ ID NO: 139832 - DNA, 20 bp, Artificial Sequence
  mmSKRIPTE0010611_NTC_152
  gRNA
aggtccgctggcgcaatggg

SEQ ID NO: 139833 - DNA, 20 bp, Artificial Sequence
  mmSKRIPTE0010612_NTC_153
  gRNA
aggtcgtggacccgcatgta

SEQ ID NO: 139834 - DNA, 20 bp, Artificial Sequence
  mmSKRIPTE0010613_NTC_154
  gRNA
aggtgcgtgtcaaccggtag

SEQ ID NO: 139835 - DNA, 20 bp, Artificial Sequence
  mmSKRIPTE0010614_NTC_155
  gRNA
agtacactacatcgacttcg

SEQ ID NO: 139836 - DNA, 20 bp, Artificial Sequence
  mmSKRIPTE0010615_NTC_156
  gRNA
agtacagccgacgagtgcga

SEQ ID NO: 139837 - DNA, 20 bp, Artificial Sequence
  mmSKRIPTE0010616_NTC_157
  gRNA
agtagacgctatgttcgcgc

SEQ ID NO: 139838 - DNA, 20 bp, Artificial Sequence
  mmSKRIPTE0010617_NTC_158
  gRNA
agtagagtcgcgaacgctac

SEQ ID NO: 139839 - DNA, 20 bp, Artificial Sequence
  mmSKRIPTE0010618_NTC_159
  gRNA
agtcactaggcgctctcgcg

SEQ ID NO: 139840 - DNA, 20 bp, Artificial Sequence
  mmSKRIPTE0010619_NTC_160
  gRNA
agtcagctccggggtatacg

SEQ ID NO: 139841 - DNA, 20 bp, Artificial Sequence
  mmSKRIPTE0010620_NTC_161
  gRNA
agtcatcctctatgcgcgta

SEQ ID NO: 139842 - DNA, 20 bp, Artificial Sequence
  mmSKRIPTE0010621_NTC_162
  gRNA
agtcccacgtttgccgtcaa

SEQ ID NO: 139843 - DNA, 20 bp, Artificial Sequence
  mmSKRIPTE0010622_NTC_163
  gRNA
agtccggtcgaaatctgtat

SEQ ID NO: 139844 - DNA, 20 bp, Artificial Sequence
  mmSKRIPTE0010623_NTC_164
  gRNA
agtgccgggggtgtataccg

SEQ ID NO: 139845 - DNA, 20 bp, Artificial Sequence
  mmSKRIPTE0010624_NTC_165
  gRNA
agtgtcacggcaaagtcgag

SEQ ID NO: 139846 - DNA, 20 bp, Artificial Sequence
  mmSKRIPTE0010625_NTC_166
  gRNA
agttaagcgcgtatctacgt

SEQ ID NO: 139847 - DNA, 20 bp, Artificial Sequence
  mmSKRIPTE0010626_NTC_167
  gRNA
agttaagctccaatcgtctg

SEQ ID NO: 139848 - DNA, 20 bp, Artificial Sequence
  mmSKRIPTE0010627_NTC_168
  gRNA
agtttacgtggtccgatgtc

SEQ ID NO: 139849 - DNA, 20 bp, Artificial Sequence
  mmSKRIPTE0010628_NTC_169
  gRNA
ataaagtcccaggtgcgcgc

SEQ ID NO: 139850 - DNA, 20 bp, Artificial Sequence
  mmSKRIPTE0010629_NTC_170
  gRNA
ataacttactcgttacgact

SEQ ID NO: 139851 - DNA, 20 bp, Artificial Sequence
  mmSKRIPTE0010630_NTC_171
  gRNA
ataacttatgcgcttcgggg

SEQ ID NO: 139852 - DNA, 20 bp, Artificial Sequence
  mmSKRIPTE0010631_NTC_172
  gRNA
ataatgcgcgcgaatactta

SEQ ID NO: 139853 - DNA, 20 bp, Artificial Sequence
  mmSKRIPTE0010632_NTC_173
  gRNA
atacctccgctacaccgtct

SEQ ID NO: 139854 - DNA, 20 bp, Artificial Sequence
  mmSKRIPTE0010633_NTC_174
  gRNA
atacgcatagatcggtaagc

SEQ ID NO: 139855 - DNA, 20 bp, Artificial Sequence
  mmSKRIPTE0010634_NTC_175
  gRNA
atacgcgtgatgaccttatg

SEQ ID NO: 139856 - DNA, 20 bp, Artificial Sequence
  mmSKRIPTE0010635_NTC_176
  gRNA
atagatgtctacgcgccgtt

SEQ ID NO: 139857 - DNA, 20 bp, Artificial Sequence
  mmSKRIPTE0010636_NTC_177
  gRNA
atagcccggtttgcccgtct

SEQ ID NO: 139858 - DNA, 20 bp, Artificial Sequence
  mmSKRIPTE0010637_NTC_178
  gRNA
ataggcgcacgggctactcc

SEQ ID NO: 139859 - DNA, 20 bp, Artificial Sequence
  mmSKRIPTE0010638_NTC_179
  gRNA
atatcgaatgatgtccgcat

SEQ ID NO: 139860 - DNA, 20 bp, Artificial Sequence
  mmSKRIPTE0010639_NTC_180
  gRNA
atatgagcccgacctctcga

SEQ ID NO: 139861 - DNA, 20 bp, Artificial Sequence
  mmSKRIPTE0010640_NTC_181
  gRNA
atatgctcgacccatcgtcc

SEQ ID NO: 139862 - DNA, 20 bp, Artificial Sequence
  mmSKRIPTE0010641_NTC_182
  gRNA
atattgtcccatacgatcgg

SEQ ID NO: 139863 - DNA, 20 bp, Artificial Sequence
  mmSKRIPTE0010642_NTC_183
  gRNA
atcacacgttaaacggggcg

SEQ ID NO: 139864 - DNA, 20 bp, Artificial Sequence
  mmSKRIPTE0010643_NTC_184
  gRNA
atcatgccttcgcattaacc

SEQ ID NO: 139865 - DNA, 20 bp, Artificial Sequence
  mmSKRIPTE0010644_NTC_185
  gRNA
atccacgctccgcggtactt

SEQ ID NO: 139866 - DNA, 20 bp, Artificial Sequence
  mmSKRIPTE0010645_NTC_186
  gRNA
atccccccgacttagggatt

SEQ ID NO: 139867 - DNA, 20 bp, Artificial Sequence
  mmSKRIPTE0010646_NTC_187
  gRNA
atccgagatctgcgaattat

SEQ ID NO: 139868 - DNA, 20 bp, Artificial Sequence
  mmSKRIPTE0010647_NTC_188
  gRNA
atccgggcatagcgtttaaa

SEQ ID NO: 139869 - DNA, 20 bp, Artificial Sequence
  mmSKRIPTE0010648_NTC_189
  gRNA
atccgtaccaaacacgctac

SEQ ID NO: 139870 - DNA, 20 bp, Artificial Sequence
  mmSKRIPTE0010649_NTC_190
  gRNA
atcgagcaccgagttgtgat

SEQ ID NO: 139871 - DNA, 20 bp, Artificial Sequence
  mmSKRIPTE0010650_NTC_191
  gRNA
atcgatattgataaacgcga

SEQ ID NO: 139872 - DNA, 20 bp, Artificial Sequence
  mmSKRIPTE0010651_NTC_192
  gRNA
atcgcaggtctacgcagagt

SEQ ID NO: 139873 - DNA, 20 bp, Artificial Sequence
  mmSKRIPTE0010652_NTC_193
  gRNA
atcgcctagcccaagcgacg

SEQ ID NO: 139874 - DNA, 20 bp, Artificial Sequence
  mmSKRIPTE0010653_NTC_194
  gRNA
atcgcggcgcgttaaggcag

SEQ ID NO: 139875 - DNA, 20 bp, Artificial Sequence
  mmSKRIPTE0010654_NTC_195
  gRNA
atcgctaatttacgaaggcg

SEQ ID NO: 139876 - DNA, 20 bp, Artificial Sequence
  mmSKRIPTE0010655_NTC_196
  gRNA
atcgtaaattacacgtacag

SEQ ID NO: 139877 - DNA, 20 bp, Artificial Sequence
  mmSKRIPTE0010656_NTC_197
  gRNA
atcttaaccagcgcatcccg

SEQ ID NO: 139878 - DNA, 20 bp, Artificial Sequence
  mmSKRIPTE0010657_NTC_198
  gRNA
atgacacttacggtactcgt

SEQ ID NO: 139879 - DNA, 20 bp, Artificial Sequence
  mmSKRIPTE0010658_NTC_199
  gRNA
atgacctcttcgttcgagag

SEQ ID NO: 139880 - DNA, 20 bp, Artificial Sequence
  mmSKRIPTE0010659_NTC_200
  gRNA
atgatgtgatccttcgccga

SEQ ID NO: 139881 - DNA, 20 bp, Artificial Sequence
  mmSKRIPTE0010660_NTC_201
  gRNA
atgccaatgccgttgttagc

SEQ ID NO: 139882 - DNA, 20 bp, Artificial Sequence
  mmSKRIPTE0010661_NTC_202
  gRNA
atggacccttcagtgcggta

SEQ ID NO: 139883 - DNA, 20 bp, Artificial Sequence
  mmSKRIPTE0010662_NTC_203
  gRNA
atgggaaagcccacgacaat

SEQ ID NO: 139884 - DNA, 20 bp, Artificial Sequence
  mmSKRIPTE0010663_NTC_204
  gRNA
atggtggctgtactcgtaac

SEQ ID NO: 139885 - DNA, 20 bp, Artificial Sequence
  mmSKRIPTE0010664_NTC_205
  gRNA
atgtgtatgaagcccgtcat

SEQ ID NO: 139886 - DNA, 20 bp, Artificial Sequence
  mmSKRIPTE0010665_NTC_206
  gRNA
atgtgtcatagcggcgtagg

SEQ ID NO: 139887 - DNA, 20 bp, Artificial Sequence
  mmSKRIPTE0010666_NTC_207
  gRNA
atgttacgtacgtgatctcc

SEQ ID NO: 139888 - DNA, 20 bp, Artificial Sequence
  mmSKRIPTE0010667_NTC_208
  gRNA
atgttgcagcgctgtacgcc

SEQ ID NO: 139889 - DNA, 20 bp, Artificial Sequence
  mmSKRIPTE0010668_NTC_209
  gRNA
atgttgcagttcggctcgat

SEQ ID NO: 139890 - DNA, 20 bp, Artificial Sequence
  mmSKRIPTE0010669_NTC_210
  gRNA
attaggtgactggaacacgt

SEQ ID NO: 139891 - DNA, 20 bp, Artificial Sequence
  mmSKRIPTE0010670_NTC_211
  gRNA
attatagcagccccccgaat

SEQ ID NO: 139892 - DNA, 20 bp, Artificial Sequence
  mmSKRIPTE0010671_NTC_212
  gRNA
attattcctccggatgacga

SEQ ID NO: 139893 - DNA, 20 bp, Artificial Sequence
  mmSKRIPTE0010672_NTC_213
  gRNA
attcagtgtaccggtcaaat

SEQ ID NO: 139894 - DNA, 20 bp, Artificial Sequence
  mmSKRIPTE0010673_NTC_214
  gRNA
attccgtttgcagcgagacc

SEQ ID NO: 139895 - DNA, 20 bp, Artificial Sequence
  mmSKRIPTE0010674_NTC_215
  gRNA
attcggaccgttatctcacc

SEQ ID NO: 139896 - DNA, 20 bp, Artificial Sequence
  mmSKRIPTE0010675_NTC_216
  gRNA
attcgtgcatcgcggggttt

SEQ ID NO: 139897 - DNA, 20 bp, Artificial Sequence
  mmSKRIPTE0010676_NTC_217
  gRNA
attgttcgaccgtctacggg

SEQ ID NO: 139898 - DNA, 20 bp, Artificial Sequence
  mmSKRIPTE0010677_NTC_218
  gRNA
atttgaatgctcccgtcgac

SEQ ID NO: 139899 - DNA, 20 bp, Artificial Sequence
  mmSKRIPTE0010678_NTC_219
  gRNA
atttgcccgtccatacgcgg

SEQ ID NO: 139900 - DNA, 20 bp, Artificial Sequence
  mmSKRIPTE0010679_NTC_220
  gRNA
caaacgaggccacgtacgtg

SEQ ID NO: 139901 - DNA, 20 bp, Artificial Sequence
  mmSKRIPTE0010680_NTC_221
  gRNA
caaagtaactatctcgtcga

SEQ ID NO: 139902 - DNA, 20 bp, Artificial Sequence
  mmSKRIPTE0010681_NTC_222
  gRNA
caacacgtgcgagcgaactg

SEQ ID NO: 139903 - DNA, 20 bp, Artificial Sequence
  mmSKRIPTE0010682_NTC_223
  gRNA
caaccgtgcgatgcgcgcta

SEQ ID NO: 139904 - DNA, 20 bp, Artificial Sequence
  mmSKRIPTE0010683_NTC_224
  gRNA
caacctgcctagcgacccgc

SEQ ID NO: 139905 - DNA, 20 bp, Artificial Sequence
  mmSKRIPTE0010684_NTC_225
  gRNA
caacgatcaggcgtgttatc

SEQ ID NO: 139906 - DNA, 20 bp, Artificial Sequence
  mmSKRIPTE0010685_NTC_226
  gRNA
caacggtcacgctagaataa

SEQ ID NO: 139907 - DNA, 20 bp, Artificial Sequence
  mmSKRIPTE0010686_NTC_227
  gRNA
caagagttaacctcgaccgg

SEQ ID NO: 139908 - DNA, 20 bp, Artificial Sequence
  mmSKRIPTE0010687_NTC_228
  gRNA
caaggatcgtgccgtgattt

SEQ ID NO: 139909 - DNA, 20 bp, Artificial Sequence
  mmSKRIPTE0010688_NTC_229
  gRNA
caaggggtggtcattgcgac

SEQ ID NO: 139910 - DNA, 20 bp, Artificial Sequence
  mmSKRIPTE0010689_NTC_230
  gRNA
caatacaccgttaaccctct

SEQ ID NO: 139911 - DNA, 20 bp, Artificial Sequence
  mmSKRIPTE0010690_NTC_231
  gRNA
caatatctaagcgctaacga

SEQ ID NO: 139912 - DNA, 20 bp, Artificial Sequence
  mmSKRIPTE0010691_NTC_232
  gRNA
caatatgcacgtagcctcgt

SEQ ID NO: 139913 - DNA, 20 bp, Artificial Sequence
  mmSKRIPTE0010692_NTC_233
  gRNA
caatattcgacctacgctcc

SEQ ID NO: 139914 - DNA, 20 bp, Artificial Sequence
  mmSKRIPTE0010693_NTC_234
  gRNA
caatggcgtctgccgttcag

SEQ ID NO: 139915 - DNA, 20 bp, Artificial Sequence
  mmSKRIPTE0010694_NTC_235
  gRNA
cacaacgcctaccagcggac

SEQ ID NO: 139916 - DNA, 20 bp, Artificial Sequence
  mmSKRIPTE0010695_NTC_236
  gRNA
cacaatacgcggcagaggtc

SEQ ID NO: 139917 - DNA, 20 bp, Artificial Sequence
  mmSKRIPTE0010696_NTC_237
  gRNA
cacacgccgcgggccgtgag

SEQ ID NO: 139918 - DNA, 20 bp, Artificial Sequence
  mmSKRIPTE0010697_NTC_238
  gRNA
caccccgtagcaacgataaa

SEQ ID NO: 139919 - DNA, 20 bp, Artificial Sequence
  mmSKRIPTE0010698_NTC_239
  gRNA
cacccgactcggccgtaaag

SEQ ID NO: 139920 - DNA, 20 bp, Artificial Sequence
  mmSKRIPTE0010699_NTC_240
  gRNA
caccgctgccctagtaccgg

SEQ ID NO: 139921 - DNA, 20 bp, Artificial Sequence
  mmSKRIPTE0010700_NTC_241
  gRNA
cacctattcccctccgcaac

SEQ ID NO: 139922 - DNA, 20 bp, Artificial Sequence
  mmSKRIPTE0010701_NTC_242
  gRNA
cacctcgcgtcatatcacta

SEQ ID NO: 139923 - DNA, 20 bp, Artificial Sequence
  mmSKRIPTE0010702_NTC_243
  gRNA
cacctttcgaggtaacaccg

SEQ ID NO: 139924 - DNA, 20 bp, Artificial Sequence
  mmSKRIPTE0010703_NTC_244
  gRNA
cacgaataactacaggttgc

SEQ ID NO: 139925 - DNA, 20 bp, Artificial Sequence
  mmSKRIPTE0010704_NTC_245
  gRNA
cacgcaggagcggcgacact

SEQ ID NO: 139926 - DNA, 20 bp, Artificial Sequence
  mmSKRIPTE0010705_NTC_246
  gRNA
cacgccttcgtcaaccctat

SEQ ID NO: 139927 - DNA, 20 bp, Artificial Sequence
  mmSKRIPTE0010706_NTC_247
  gRNA
cacggcaggcatctcgtcta

SEQ ID NO: 139928 - DNA, 20 bp, Artificial Sequence
  mmSKRIPTE0010707_NTC_248
  gRNA
cacgggcagcgatctagttg

SEQ ID NO: 139929 - DNA, 20 bp, Artificial Sequence
  mmSKRIPTE0010708_NTC_249
  gRNA
cacgtaagacgctccactta

SEQ ID NO: 139930 - DNA, 20 bp, Artificial Sequence
  mmSKRIPTE0010709_NTC_250
  gRNA
cacgtatacttaggtcagcg

SEQ ID NO: 139931 - DNA, 20 bp, Artificial Sequence
  mmSKRIPTE0010710_NTC_251
  gRNA
cactcagcggttggacgccc

SEQ ID NO: 139932 - DNA, 20 bp, Artificial Sequence
  mmSKRIPTE0010711_NTC_252
  gRNA
cagaaactcttaccgagcgc

SEQ ID NO: 139933 - DNA, 20 bp, Artificial Sequence
  mmSKRIPTE0010712_NTC_253
  gRNA
cagcaccacgcgtcgtgcgg

SEQ ID NO: 139934 - DNA, 20 bp, Artificial Sequence
  mmSKRIPTE0010713_NTC_254
  gRNA
cagccaccgcaccggcgtaa

SEQ ID NO: 139935 - DNA, 20 bp, Artificial Sequence
  mmSKRIPTE0010714_NTC_255
  gRNA
cagcgactctgatcggcgta

SEQ ID NO: 139936 - DNA, 20 bp, Artificial Sequence
  mmSKRIPTE0010715_NTC_256
  gRNA
cagctcaccctgcgtacggt

SEQ ID NO: 139937 - DNA, 20 bp, Artificial Sequence
  mmSKRIPTE0010716_NTC_257
  gRNA
cagctgaccgttaatcgata

SEQ ID NO: 139938 - DNA, 20 bp, Artificial Sequence
  mmSKRIPTE0010717_NTC_258
  gRNA
cagggacgtagccgccgtta

SEQ ID NO: 139939 - DNA, 20 bp, Artificial Sequence
  mmSKRIPTE0010718_NTC_259
  gRNA
caggtttcccctagtcgaat

SEQ ID NO: 139940 - DNA, 20 bp, Artificial Sequence
  mmSKRIPTE0010719_NTC_260
  gRNA
cagtgccggtagcggcacgg

SEQ ID NO: 139941 - DNA, 20 bp, Artificial Sequence
  mmSKRIPTE0010720_NTC_261
  gRNA
catacccgcgccgtgactcc

SEQ ID NO: 139942 - DNA, 20 bp, Artificial Sequence
  mmSKRIPTE0010721_NTC_262
  gRNA
catacccggtgtttcctagc

SEQ ID NO: 139943 - DNA, 20 bp, Artificial Sequence
  mmSKRIPTE0010722_NTC_263
  gRNA
catactgttatcgacccgca

SEQ ID NO: 139944 - DNA, 20 bp, Artificial Sequence
  mmSKRIPTE0010723_NTC_264
  gRNA
catagatccgcgattgtacg

SEQ ID NO: 139945 - DNA, 20 bp, Artificial Sequence
  mmSKRIPTE0010724_NTC_265
  gRNA
catagcaacgcccaaactcg

SEQ ID NO: 139946 - DNA, 20 bp, Artificial Sequence
  mmSKRIPTE0010725_NTC_266
  gRNA
catatactcttgcgctagac

SEQ ID NO: 139947 - DNA, 20 bp, Artificial Sequence
  mmSKRIPTE0010726_NTC_267
  gRNA
catatgcctataaccggcgg

SEQ ID NO: 139948 - DNA, 20 bp, Artificial Sequence
  mmSKRIPTE0010727_NTC_268
  gRNA
catatgctcgacggtataaa

SEQ ID NO: 139949 - DNA, 20 bp, Artificial Sequence
  mmSKRIPTE0010728_NTC_269
  gRNA
catcagcccattatgactcg

SEQ ID NO: 139950 - DNA, 20 bp, Artificial Sequence
  mmSKRIPTE0010729_NTC_270
  gRNA
catcccccgactacgactac

SEQ ID NO: 139951 - DNA, 20 bp, Artificial Sequence
  mmSKRIPTE0010730_NTC_271
  gRNA
catcgagggtaaacgccatt

SEQ ID NO: 139952 - DNA, 20 bp, Artificial Sequence
  mmSKRIPTE0010731_NTC_272
  gRNA
catcgccgacgatcctctgg

SEQ ID NO: 139953 - DNA, 20 bp, Artificial Sequence
  mmSKRIPTE0010732_NTC_273
  gRNA
catcggctatgtcggggaca

SEQ ID NO: 139954 - DNA, 20 bp, Artificial Sequence
  mmSKRIPTE0010733_NTC_274
  gRNA
catcggtagtcactacgccc

SEQ ID NO: 139955 - DNA, 20 bp, Artificial Sequence
  mmSKRIPTE0010734_NTC_275
  gRNA
catcgtaacacacgtacgag

SEQ ID NO: 139956 - DNA, 20 bp, Artificial Sequence
  mmSKRIPTE0010735_NTC_276
  gRNA
catctatgagacgtgcgtac

SEQ ID NO: 139957 - DNA, 20 bp, Artificial Sequence
  mmSKRIPTE0010736_NTC_277
  gRNA
catgcccgtctgcgccgcat

SEQ ID NO: 139958 - DNA, 20 bp, Artificial Sequence
  mmSKRIPTE0010737_NTC_278
  gRNA
catgggaccccccctcacgt

SEQ ID NO: 139959 - DNA, 20 bp, Artificial Sequence
  mmSKRIPTE0010738_NTC_279
  gRNA
cattacgtgtcgagctccgg

SEQ ID NO: 139960 - DNA, 20 bp, Artificial Sequence
  mmSKRIPTE0010739_NTC_280
  gRNA
cattcggtccgttcatctcg

SEQ ID NO: 139961 - DNA, 20 bp, Artificial Sequence
  mmSKRIPTE0010740_NTC_281
  gRNA
cattctctgacgaatgcgcc

SEQ ID NO: 139962 - DNA, 20 bp, Artificial Sequence
  mmSKRIPTE0010741_NTC_282
  gRNA
cattgtagactcgtacggat

SEQ ID NO: 139963 - DNA, 20 bp, Artificial Sequence
  mmSKRIPTE0010742_NTC_283
  gRNA
catttccggggtccgatgca

SEQ ID NO: 139964 - DNA, 20 bp, Artificial Sequence
  mmSKRIPTE0010743_NTC_284
  gRNA
ccaacatcggggcgcataat

SEQ ID NO: 139965 - DNA, 20 bp, Artificial Sequence
  mmSKRIPTE0010744_NTC_285
  gRNA
ccaacccggcatcgtccgct

SEQ ID NO: 139966 - DNA, 20 bp, Artificial Sequence
  mmSKRIPTE0010745_NTC_286
  gRNA
ccaacctaaggcaatacggt

SEQ ID NO: 139967 - DNA, 20 bp, Artificial Sequence
  mmSKRIPTE0010746_NTC_287
  gRNA
ccaaggcgcacgctacgtgg

SEQ ID NO: 139968 - DNA, 20 bp, Artificial Sequence
  mmSKRIPTE0010747_NTC_288
  gRNA
ccagcggacggcgaactcca

SEQ ID NO: 139969 - DNA, 20 bp, Artificial Sequence
  mmSKRIPTE0010748_NTC_289
  gRNA
ccagctaacgttttagtacg

SEQ ID NO: 139970 - DNA, 20 bp, Artificial Sequence
  mmSKRIPTE0010749_NTC_290
  gRNA
ccatcggttcgacttaccgc

SEQ ID NO: 139971 - DNA, 20 bp, Artificial Sequence
  mmSKRIPTE0010750_NTC_291
  gRNA
ccattagtacgaacattgcg

SEQ ID NO: 139972 - DNA, 20 bp, Artificial Sequence
  mmSKRIPTE0010751_NTC_292
  gRNA
cccacttaataacgccgctt

SEQ ID NO: 139973 - DNA, 20 bp, Artificial Sequence
  mmSKRIPTE0010752_NTC_293
  gRNA
cccatcattcgcgctgacgt

SEQ ID NO: 139974 - DNA, 20 bp, Artificial Sequence
  mmSKRIPTE0010753_NTC_294
  gRNA
cccattcaacaccgtttgta

SEQ ID NO: 139975 - DNA, 20 bp, Artificial Sequence
  mmSKRIPTE0010754_NTC_295
  gRNA
cccctataggcgcgctaagg

SEQ ID NO: 139976 - DNA, 20 bp, Artificial Sequence
  mmSKRIPTE0010755_NTC_296
  gRNA
ccccttcgatatccgatgac

SEQ ID NO: 139977 - DNA, 20 bp, Artificial Sequence
  mmSKRIPTE0010756_NTC_297
  gRNA
cccgcctggcgattcacggg

SEQ ID NO: 139978 - DNA, 20 bp, Artificial Sequence
  mmSKRIPTE0010757_NTC_298
  gRNA
cccggcagactaactagcgc

SEQ ID NO: 139979 - DNA, 20 bp, Artificial Sequence
  mmSKRIPTE0010758_NTC_299
  gRNA
cccgggtacaccaatagcca

SEQ ID NO: 139980 - DNA, 20 bp, Artificial Sequence
  mmSKRIPTE0010759_NTC_300
  gRNA
cccggtcggggatactaact

SEQ ID NO: 139981 - DNA, 20 bp, Artificial Sequence
  mmSKRIPTE0010760_NTC_301
  gRNA
cccgtaggggtcgtggtttt

SEQ ID NO: 139982 - DNA, 20 bp, Artificial Sequence
  mmSKRIPTE0010761_NTC_302
  gRNA
ccctaaaccatagtttcgcc

SEQ ID NO: 139983 - DNA, 20 bp, Artificial Sequence
  mmSKRIPTE0010762_NTC_303
  gRNA
ccctagctcggttagagaat

SEQ ID NO: 139984 - DNA, 20 bp, Artificial Sequence
  mmSKRIPTE0010763_NTC_304
  gRNA
ccctatatgcgagatccata

SEQ ID NO: 139985 - DNA, 20 bp, Artificial Sequence
  mmSKRIPTE0010764_NTC_305
  gRNA
ccctcggttgagcagcgcga

SEQ ID NO: 139986 - DNA, 20 bp, Artificial Sequence
  mmSKRIPTE0010765_NTC_306
  gRNA
ccctgatgtgctatacgcgc

SEQ ID NO: 139987 - DNA, 20 bp, Artificial Sequence
  mmSKRIPTE0010766_NTC_307
  gRNA
cccttaaagtgacggacgaa

SEQ ID NO: 139988 - DNA, 20 bp, Artificial Sequence
  mmSKRIPTE0010767_NTC_308
  gRNA
ccgaccgtgtgagagtacgt

SEQ ID NO: 139989 - DNA, 20 bp, Artificial Sequence
  mmSKRIPTE0010768_NTC_309
  gRNA
ccgactgccgagctaggcgt

SEQ ID NO: 139990 - DNA, 20 bp, Artificial Sequence
  mmSKRIPTE0010769_NTC_310
  gRNA
ccgagaggtactccaattcg

SEQ ID NO: 139991 - DNA, 20 bp, Artificial Sequence
  mmSKRIPTE0010770_NTC_311
  gRNA
ccgagatggctcggatagac

SEQ ID NO: 139992 - DNA, 20 bp, Artificial Sequence
  mmSKRIPTE0010771_NTC_312
  gRNA
ccgagcaccctatttatcta

SEQ ID NO: 139993 - DNA, 20 bp, Artificial Sequence
  mmSKRIPTE0010772_NTC_313
  gRNA
ccgagccgaattgggcgtgt

SEQ ID NO: 139994 - DNA, 20 bp, Artificial Sequence
  mmSKRIPTE0010773_NTC_314
  gRNA
ccgataccattgtcaccaat

SEQ ID NO: 139995 - DNA, 20 bp, Artificial Sequence
  mmSKRIPTE0010774_NTC_315
  gRNA
ccgcaccgcagtcatggtaa

SEQ ID NO: 139996 - DNA, 20 bp, Artificial Sequence
  mmSKRIPTE0010775_NTC_316
  gRNA
ccgcccctgcgaactgcgtt

SEQ ID NO: 139997 - DNA, 20 bp, Artificial Sequence
  mmSKRIPTE0010776_NTC_317
  gRNA
ccgcccgggtgtgagttgag

SEQ ID NO: 139998 - DNA, 20 bp, Artificial Sequence
  mmSKRIPTE0010777_NTC_318
  gRNA
ccgcgcattaacgatcagta

SEQ ID NO: 139999 - DNA, 20 bp, Artificial Sequence
  mmSKRIPTE0010778_NTC_319
  gRNA
ccgcgccgttagggaacgag

SEQ ID NO: 140000 - DNA, 20 bp, Artificial Sequence
  mmSKRIPTE0010779_NTC_320
  gRNA
ccgcgtgacgcaatcccttg

SEQ ID NO: 140001 - DNA, 20 bp, Artificial Sequence
  mmSKRIPTE0010780_NTC_321
  gRNA
ccgcttgggcgctattaatt

SEQ ID NO: 140002 - DNA, 20 bp, Artificial Sequence
  mmSKRIPTE0010781_NTC_322
  gRNA
ccggacttgttatacttgat

SEQ ID NO: 140003 - DNA, 20 bp, Artificial Sequence
  mmSKRIPTE0010782_NTC_323
  gRNA
ccggagcgcgttgcagttct

SEQ ID NO: 140004 - DNA, 20 bp, Artificial Sequence
  mmSKRIPTE0010783_NTC_324
  gRNA
ccggatcggctacgctacgg

SEQ ID NO: 140005 - DNA, 20 bp, Artificial Sequence
  mmSKRIPTE0010784_NTC_325
  gRNA
ccggcgctgcggtcggcttg

SEQ ID NO: 140006 - DNA, 20 bp, Artificial Sequence
  mmSKRIPTE0010785_NTC_326
  gRNA
ccggcttgaataccgtgcgg

SEQ ID NO: 140007 - DNA, 20 bp, Artificial Sequence
  mmSKRIPTE0010786_NTC_327
  gRNA
ccgggcgccgtatcccctac

SEQ ID NO: 140008 - DNA, 20 bp, Artificial Sequence
  mmSKRIPTE0010787_NTC_328
  gRNA
ccggtttataaattacgtgg

SEQ ID NO: 140009 - DNA, 20 bp, Artificial Sequence
  mmSKRIPTE0010788_NTC_329
  gRNA
ccgtatacgtatctatgccg

SEQ ID NO: 140010 - DNA, 20 bp, Artificial Sequence
  mmSKRIPTE0010789_NTC_330
  gRNA
ccgtcgagcaatcccgccaa

SEQ ID NO: 140011 - DNA, 20 bp, Artificial Sequence
  mmSKRIPTE0010790_NTC_331
  gRNA
ccgtgatttcggtagcgtac

SEQ ID NO: 140012 - DNA, 20 bp, Artificial Sequence
  mmSKRIPTE0010791_NTC_332
  gRNA
ccgttcaattatgctggcgt

SEQ ID NO: 140013 - DNA, 20 bp, Artificial Sequence
  mmSKRIPTE0010792_NTC_333
  gRNA
ccgttctgacgacgctaaag

SEQ ID NO: 140014 - DNA, 20 bp, Artificial Sequence
  mmSKRIPTE0010793_NTC_334
  gRNA
ccgtttcgcctattggtgcg

SEQ ID NO: 140015 - DNA, 20 bp, Artificial Sequence
  mmSKRIPTE0010794_NTC_335
  gRNA
cctaactcgaagtctcgtca

SEQ ID NO: 140016 - DNA, 20 bp, Artificial Sequence
  mmSKRIPTE0010795_NTC_336
  gRNA
cctactaacgacgagtcaaa

SEQ ID NO: 140017 - DNA, 20 bp, Artificial Sequence
  mmSKRIPTE0010796_NTC_337
  gRNA
cctattagtccggtttagtc

SEQ ID NO: 140018 - DNA, 20 bp, Artificial Sequence
  mmSKRIPTE0010797_NTC_338
  gRNA
cctcaaatagcgaacgtcaa

SEQ ID NO: 140019 - DNA, 20 bp, Artificial Sequence
  mmSKRIPTE0010798_NTC_339
  gRNA
cctccagtagcgtcattaac

SEQ ID NO: 140020 - DNA, 20 bp, Artificial Sequence
  mmSKRIPTE0010799_NTC_340
  gRNA
cctccttcagttcgatctgg

SEQ ID NO: 140021 - DNA, 20 bp, Artificial Sequence
  mmSKRIPTE0010800_NTC_341
  gRNA
cctgctattctcgcatgcga

SEQ ID NO: 140022 - DNA, 20 bp, Artificial Sequence
  mmSKRIPTE0010801_NTC_342
  gRNA
ccttacggcggagaacgagt

SEQ ID NO: 140023 - DNA, 20 bp, Artificial Sequence
  mmSKRIPTE0010802_NTC_343
  gRNA
ccttagaccgggtgtacctc

SEQ ID NO: 140024 - DNA, 20 bp, Artificial Sequence
  mmSKRIPTE0010803_NTC_344
  gRNA
ccttcggattcgtaggctgg

SEQ ID NO: 140025 - DNA, 20 bp, Artificial Sequence
  mmSKRIPTE0010804_NTC_345
  gRNA
ccttgtggcgtgccaaacga

SEQ ID NO: 140026 - DNA, 20 bp, Artificial Sequence
  mmSKRIPTE0010805_NTC_346
  gRNA
cctttgatgggcgcgtactc

SEQ ID NO: 140027 - DNA, 20 bp, Artificial Sequence
  mmSKRIPTE0010806_NTC_347
  gRNA
cgaaaccatacctccttcga

SEQ ID NO: 140028 - DNA, 20 bp, Artificial Sequence
  mmSKRIPTE0010807_NTC_348
  gRNA
cgaaaggcccgactgcgtgg

SEQ ID NO: 140029 - DNA, 20 bp, Artificial Sequence
  mmSKRIPTE0010808_NTC_349
  gRNA
cgaacttctaccgttgtgcg

SEQ ID NO: 140030 - DNA, 20 bp, Artificial Sequence
  mmSKRIPTE0010809_NTC_350
  gRNA
cgaagtacacggttctctcg

SEQ ID NO: 140031 - DNA, 20 bp, Artificial Sequence
  mmSKRIPTE0010810_NTC_351
  gRNA
cgaatcgggaaggcgcgtgt

SEQ ID NO: 140032 - DNA, 20 bp, Artificial Sequence
  mmSKRIPTE0010811_NTC_352
  gRNA
cgaatgcacaggctcgcggt

SEQ ID NO: 140033 - DNA, 20 bp, Artificial Sequence
  mmSKRIPTE0010812_NTC_353
  gRNA
cgaatgcgccggagaatatt

SEQ ID NO: 140034 - DNA, 20 bp, Artificial Sequence
  mmSKRIPTE0010813_NTC_354
  gRNA
cgacacgatggtcatactac

SEQ ID NO: 140035 - DNA, 20 bp, Artificial Sequence
  mmSKRIPTE0010814_NTC_355
  gRNA
cgacacttgggctgacgcgc

SEQ ID NO: 140036 - DNA, 20 bp, Artificial Sequence
  mmSKRIPTE0010815_NTC_356
  gRNA
cgacgacccatttcggttat

SEQ ID NO: 140037 - DNA, 20 bp, Artificial Sequence
  mmSKRIPTE0010816_NTC_357
  gRNA
cgacgaccttggattggcag

SEQ ID NO: 140038 - DNA, 20 bp, Artificial Sequence
  mmSKRIPTE0010817_NTC_358
  gRNA
cgacggttgtgctgaggctt

SEQ ID NO: 140039 - DNA, 20 bp, Artificial Sequence
  mmSKRIPTE0010818_NTC_359
  gRNA
cgactattgccgtccatctc

SEQ ID NO: 140040 - DNA, 20 bp, Artificial Sequence
  mmSKRIPTE0010819_NTC_360
  gRNA
cgactccgggaatatccgtt

SEQ ID NO: 140041 - DNA, 20 bp, Artificial Sequence
  mmSKRIPTE0010820_NTC_361
  gRNA
cgactcgcttaaccgtgcag

SEQ ID NO: 140042 - DNA, 20 bp, Artificial Sequence
  mmSKRIPTE0010821_NTC_362
  gRNA
cgagacgaatccatcatgcg

SEQ ID NO: 140043 - DNA, 20 bp, Artificial Sequence
  mmSKRIPTE0010822_NTC_363
  gRNA
cgagagaatcgtccgtcata

SEQ ID NO: 140044 - DNA, 20 bp, Artificial Sequence
  mmSKRIPTE0010823_NTC_364
  gRNA
cgagcctcgtctttcatggg

SEQ ID NO: 140045 - DNA, 20 bp, Artificial Sequence
  mmSKRIPTE0010824_NTC_365
  gRNA
cgagctcggcaaatttgatt

SEQ ID NO: 140046 - DNA, 20 bp, Artificial Sequence
  mmSKRIPTE0010825_NTC_366
  gRNA
cgaggatgtacatacgtaaa

SEQ ID NO: 140047 - DNA, 20 bp, Artificial Sequence
  mmSKRIPTE0010826_NTC_367
  gRNA
cgaggcttaacgccagattc

SEQ ID NO: 140048 - DNA, 20 bp, Artificial Sequence
  mmSKRIPTE0010827_NTC_368
  gRNA
cgagtaattatttgcggtcg

SEQ ID NO: 140049 - DNA, 20 bp, Artificial Sequence
  mmSKRIPTE0010828_NTC_369
  gRNA
cgagtatcagcatgtcgacg

SEQ ID NO: 140050 - DNA, 20 bp, Artificial Sequence
  mmSKRIPTE0010829_NTC_370
  gRNA
cgatacgctatagaatagtc

SEQ ID NO: 140051 - DNA, 20 bp, Artificial Sequence
  mmSKRIPTE0010830_NTC_371
  gRNA
cgatgtcgaaagtcggtcaa

SEQ ID NO: 140052 - DNA, 20 bp, Artificial Sequence
  mmSKRIPTE0010831_NTC_372
  gRNA
cgattgacgttgggctctca

SEQ ID NO: 140053 - DNA, 20 bp, Artificial Sequence
  mmSKRIPTE0010832_NTC_373
  gRNA
cgcacttctagtagctgtcg

SEQ ID NO: 140054 - DNA, 20 bp, Artificial Sequence
  mmSKRIPTE0010833_NTC_374
  gRNA
cgcagagttcaaatccgcgc

SEQ ID NO: 140055 - DNA, 20 bp, Artificial Sequence
  mmSKRIPTE0010834_NTC_375
  gRNA
cgcatagtgtaccgttgcgc

SEQ ID NO: 140056 - DNA, 20 bp, Artificial Sequence
  mmSKRIPTE0010835_NTC_376
  gRNA
cgccaatggtggccgactcg

SEQ ID NO: 140057 - DNA, 20 bp, Artificial Sequence
  mmSKRIPTE0010836_NTC_377
  gRNA
cgccagtataccacattcgt

SEQ ID NO: 140058 - DNA, 20 bp, Artificial Sequence
  mmSKRIPTE0010837_NTC_378
  gRNA
cgcccctagttgtcccgccc

SEQ ID NO: 140059 - DNA, 20 bp, Artificial Sequence
  mmSKRIPTE0010838_NTC_379
  gRNA
cgccggatgactggtggata

SEQ ID NO: 140060 - DNA, 20 bp, Artificial Sequence
  mmSKRIPTE0010839_NTC_380
  gRNA
cgcctagtatcttcggggat

SEQ ID NO: 140061 - DNA, 20 bp, Artificial Sequence
  mmSKRIPTE0010840_NTC_381
  gRNA
cgcgacgtacggctggagca

SEQ ID NO: 140062 - DNA, 20 bp, Artificial Sequence
  mmSKRIPTE0010841_NTC_382
  gRNA
cgcgccgagggcctcgttac

SEQ ID NO: 140063 - DNA, 20 bp, Artificial Sequence
  mmSKRIPTE0010842_NTC_383
  gRNA
cgcgcctacccttttaccgc

SEQ ID NO: 140064 - DNA, 20 bp, Artificial Sequence
  mmSKRIPTE0010843_NTC_384
  gRNA
cgcgcgactgcagctaatct

SEQ ID NO: 140065 - DNA, 20 bp, Artificial Sequence
  mmSKRIPTE0010844_NTC_385
  gRNA
cgcgcggatatttaaacttc

SEQ ID NO: 140066 - DNA, 20 bp, Artificial Sequence
  mmSKRIPTE0010845_NTC_386
  gRNA
cgcgcggatcttccgtacaa

SEQ ID NO: 140067 - DNA, 20 bp, Artificial Sequence
  mmSKRIPTE0010846_NTC_387
  gRNA
cgcgtatatgtcacacggca

SEQ ID NO: 140068 - DNA, 20 bp, Artificial Sequence
  mmSKRIPTE0010847_NTC_388
  gRNA
cgctacagtaatcgcaacga

SEQ ID NO: 140069 - DNA, 20 bp, Artificial Sequence
  mmSKRIPTE0010848_NTC_389
  gRNA
cgctccgtatcctctcataa

SEQ ID NO: 140070 - DNA, 20 bp, Artificial Sequence
  mmSKRIPTE0010849_NTC_390
  gRNA
cgctcggtaaggtcgattgg

SEQ ID NO: 140071 - DNA, 20 bp, Artificial Sequence
  mmSKRIPTE0010850_NTC_391
  gRNA
cgctcggtgacgtatacacg

SEQ ID NO: 140072 - DNA, 20 bp, Artificial Sequence
  mmSKRIPTE0010851_NTC_392
  gRNA
cgcttcattgcccgaacgct

SEQ ID NO: 140073 - DNA, 20 bp, Artificial Sequence
  mmSKRIPTE0010852_NTC_393
  gRNA
cgcttcgtctctcgcaaaca

SEQ ID NO: 140074 - DNA, 20 bp, Artificial Sequence
  mmSKRIPTE0010853_NTC_394
  gRNA
cggaatacgccaaaacctat

SEQ ID NO: 140075 - DNA, 20 bp, Artificial Sequence
  mmSKRIPTE0010854_NTC_395
  gRNA
cggacttaccgcagattata

SEQ ID NO: 140076 - DNA, 20 bp, Artificial Sequence
  mmSKRIPTE0010855_NTC_396
  gRNA
cggatccggtacggtcagtt

SEQ ID NO: 140077 - DNA, 20 bp, Artificial Sequence
  mmSKRIPTE0010856_NTC_397
  gRNA
cggatcctcccgtactatcc

SEQ ID NO: 140078 - DNA, 20 bp, Artificial Sequence
  mmSKRIPTE0010857_NTC_398
  gRNA
cggcaagcgcattcctatgg

SEQ ID NO: 140079 - DNA, 20 bp, Artificial Sequence
  mmSKRIPTE0010858_NTC_399
  gRNA
cggcaatgtgtggcgaccgc

SEQ ID NO: 140080 - DNA, 20 bp, Artificial Sequence
  mmSKRIPTE0010859_NTC_400
  gRNA
cggccgtagtgacgaatgga

SEQ ID NO: 140081 - DNA, 20 bp, Artificial Sequence
  mmSKRIPTE0010860_NTC_401
  gRNA
cggcgataacagcgacatcg

SEQ ID NO: 140082 - DNA, 20 bp, Artificial Sequence
  mmSKRIPTE0010861_NTC_402
  gRNA
cgggcaatatgatcgtaggc

SEQ ID NO: 140083 - DNA, 20 bp, Artificial Sequence
  mmSKRIPTE0010862_NTC_403
  gRNA
cgggcactaacccgatacac

SEQ ID NO: 140084 - DNA, 20 bp, Artificial Sequence
  mmSKRIPTE0010863_NTC_404
  gRNA
cgggcggtaagagctctacg

SEQ ID NO: 140085 - DNA, 20 bp, Artificial Sequence
  mmSKRIPTE0010864_NTC_405
  gRNA
cgggcgtcacctgctagtaa

SEQ ID NO: 140086 - DNA, 20 bp, Artificial Sequence
  mmSKRIPTE0010865_NTC_406
  gRNA
cggggcgtacatgtgtggcc

SEQ ID NO: 140087 - DNA, 20 bp, Artificial Sequence
  mmSKRIPTE0010866_NTC_407
  gRNA
cgggttatagatagtcgtcg

SEQ ID NO: 140088 - DNA, 20 bp, Artificial Sequence
  mmSKRIPTE0010867_NTC_408
  gRNA
cggtaagatggttataccgt

SEQ ID NO: 140089 - DNA, 20 bp, Artificial Sequence
  mmSKRIPTE0010868_NTC_409
  gRNA
cggtaaggtcggtctccatc

SEQ ID NO: 140090 - DNA, 20 bp, Artificial Sequence
  mmSKRIPTE0010869_NTC_410
  gRNA
cggtaccacgccccacctcg

SEQ ID NO: 140091 - DNA, 20 bp, Artificial Sequence
  mmSKRIPTE0010870_NTC_411
  gRNA
cggtcagtcgtcttcccgga

SEQ ID NO: 140092 - DNA, 20 bp, Artificial Sequence
  mmSKRIPTE0010871_NTC_412
  gRNA
cggtcgattgtggagtaatg

SEQ ID NO: 140093 - DNA, 20 bp, Artificial Sequence
  mmSKRIPTE0010872_NTC_413
  gRNA
cggtcgtgacagacctggtg

SEQ ID NO: 140094 - DNA, 20 bp, Artificial Sequence
  mmSKRIPTE0010873_NTC_414
  gRNA
cggtgaggatccctcttgcg

SEQ ID NO: 140095 - DNA, 20 bp, Artificial Sequence
  mmSKRIPTE0010874_NTC_415
  gRNA
cgtaaaccataacgttggtc

SEQ ID NO: 140096 - DNA, 20 bp, Artificial Sequence
  mmSKRIPTE0010875_NTC_416
  gRNA
cgtaaccggagataatatta

SEQ ID NO: 140097 - DNA, 20 bp, Artificial Sequence
  mmSKRIPTE0010876_NTC_417
  gRNA
cgtaccgacagtagtccaag

SEQ ID NO: 140098 - DNA, 20 bp, Artificial Sequence
  mmSKRIPTE0010877_NTC_418
  gRNA
cgtacgggcgcgccgtccat

SEQ ID NO: 140099 - DNA, 20 bp, Artificial Sequence
  mmSKRIPTE0010878_NTC_419
  gRNA
cgtagatgcctgctcgagca

SEQ ID NO: 140100 - DNA, 20 bp, Artificial Sequence
  mmSKRIPTE0010879_NTC_420
  gRNA
cgtcaatgtgtccggacggt

SEQ ID NO: 140101 - DNA, 20 bp, Artificial Sequence
  mmSKRIPTE0010880_NTC_421
  gRNA
cgtcaccgctagtaatgatg

SEQ ID NO: 140102 - DNA, 20 bp, Artificial Sequence
  mmSKRIPTE0010881_NTC_422
  gRNA
cgtcatggcaagatcgataa

SEQ ID NO: 140103 - DNA, 20 bp, Artificial Sequence
  mmSKRIPTE0010882_NTC_423
  gRNA
cgtcctcgcagcgtagactg

SEQ ID NO: 140104 - DNA, 20 bp, Artificial Sequence
  mmSKRIPTE0010883_NTC_424
  gRNA
cgtcgaagatacgcaggctg

SEQ ID NO: 140105 - DNA, 20 bp, Artificial Sequence
  mmSKRIPTE0010884_NTC_425
  gRNA
cgtcgatccctctatactgg

SEQ ID NO: 140106 - DNA, 20 bp, Artificial Sequence
  mmSKRIPTE0010885_NTC_426
  gRNA
cgtcgcatgttgttgctcat

SEQ ID NO: 140107 - DNA, 20 bp, Artificial Sequence
  mmSKRIPTE0010886_NTC_427
  gRNA
cgtgaatcgaccctcaataa

SEQ ID NO: 140108 - DNA, 20 bp, Artificial Sequence
  mmSKRIPTE0010887_NTC_428
  gRNA
cgtgattcctaagcccccgc

SEQ ID NO: 140109 - DNA, 20 bp, Artificial Sequence
  mmSKRIPTE0010888_NTC_429
  gRNA
cgtgcgttcgtaataaaagg

SEQ ID NO: 140110 - DNA, 20 bp, Artificial Sequence
  mmSKRIPTE0010889_NTC_430
  gRNA
cgtgtagtcgggtcgcatgt

SEQ ID NO: 140111 - DNA, 20 bp, Artificial Sequence
  mmSKRIPTE0010890_NTC_431
  gRNA
cgtgtgtttacagcccttac

SEQ ID NO: 140112 - DNA, 20 bp, Artificial Sequence
  mmSKRIPTE0010891_NTC_432
  gRNA
cgtgtttggcggccaacttt

SEQ ID NO: 140113 - DNA, 20 bp, Artificial Sequence
  mmSKRIPTE0010892_NTC_433
  gRNA
cgtgttttacctcgcttcga

SEQ ID NO: 140114 - DNA, 20 bp, Artificial Sequence
  mmSKRIPTE0010893_NTC_434
  gRNA
cgttaataaacgcggtttca

SEQ ID NO: 140115 - DNA, 20 bp, Artificial Sequence
  mmSKRIPTE0010894_NTC_435
  gRNA
cgttaatccaccgtatgggc

SEQ ID NO: 140116 - DNA, 20 bp, Artificial Sequence
  mmSKRIPTE0010895_NTC_436
  gRNA
cgttacgtttcttgccagga

SEQ ID NO: 140117 - DNA, 20 bp, Artificial Sequence
  mmSKRIPTE0010896_NTC_437
  gRNA
cgttagaccgaatctccggg

SEQ ID NO: 140118 - DNA, 20 bp, Artificial Sequence
  mmSKRIPTE0010897_NTC_438
  gRNA
cgttatatctacactttgcg

SEQ ID NO: 140119 - DNA, 20 bp, Artificial Sequence
  mmSKRIPTE0010898_NTC_439
  gRNA
cgttattgtacaccacgctc

SEQ ID NO: 140120 - DNA, 20 bp, Artificial Sequence
  mmSKRIPTE0010899_NTC_440
  gRNA
cgttgcgaatccaccctatt

SEQ ID NO: 140121 - DNA, 20 bp, Artificial Sequence
  mmSKRIPTE0010900_NTC_441
  gRNA
cgttgtttggagcccgtcca

SEQ ID NO: 140122 - DNA, 20 bp, Artificial Sequence
  mmSKRIPTE0010901_NTC_442
  gRNA
ctaacagcgccgttatctac

SEQ ID NO: 140123 - DNA, 20 bp, Artificial Sequence
  mmSKRIPTE0010902_NTC_443
  gRNA
ctaacgtggtagcactacaa

SEQ ID NO: 140124 - DNA, 20 bp, Artificial Sequence
  mmSKRIPTE0010903_NTC_444
  gRNA
ctaagtcgactgtttcgacc

SEQ ID NO: 140125 - DNA, 20 bp, Artificial Sequence
  mmSKRIPTE0010904_NTC_445
  gRNA
ctaatacacccggacggtac

SEQ ID NO: 140126 - DNA, 20 bp, Artificial Sequence
  mmSKRIPTE0010905_NTC_446
  gRNA
ctaatacactccttctccgc

SEQ ID NO: 140127 - DNA, 20 bp, Artificial Sequence
  mmSKRIPTE0010906_NTC_447
  gRNA
ctaattccaatatccgtctg

SEQ ID NO: 140128 - DNA, 20 bp, Artificial Sequence
  mmSKRIPTE0010907_NTC_448
  gRNA
ctacccccgctgtgcaacgt

SEQ ID NO: 140129 - DNA, 20 bp, Artificial Sequence
  mmSKRIPTE0010908_NTC_449
  gRNA
ctacccgtctattacgatct

SEQ ID NO: 140130 - DNA, 20 bp, Artificial Sequence
  mmSKRIPTE0010909_NTC_450
  gRNA
ctaccggtcacgttgtgacc

SEQ ID NO: 140131 - DNA, 20 bp, Artificial Sequence
  mmSKRIPTE0010910_NTC_451
  gRNA
ctacgagattcggctaagct

SEQ ID NO: 140132 - DNA, 20 bp, Artificial Sequence
  mmSKRIPTE0010911_NTC_452
  gRNA
ctacgagggccgcgagcggt

SEQ ID NO: 140133 - DNA, 20 bp, Artificial Sequence
  mmSKRIPTE0010912_NTC_453
  gRNA
ctacggataggcgcgggtga

SEQ ID NO: 140134 - DNA, 20 bp, Artificial Sequence
  mmSKRIPTE0010913_NTC_454
  gRNA
ctacttgtgacgacctcgcg

SEQ ID NO: 140135 - DNA, 20 bp, Artificial Sequence
  mmSKRIPTE0010914_NTC_455
  gRNA
ctatcggcccgcagtgatgg

SEQ ID NO: 140136 - DNA, 20 bp, Artificial Sequence
  mmSKRIPTE0010915_NTC_456
  gRNA
ctattgggagcggcctctcg

SEQ ID NO: 140137 - DNA, 20 bp, Artificial Sequence
  mmSKRIPTE0010916_NTC_457
  gRNA
ctcaaacctccgttaccccg

SEQ ID NO: 140138 - DNA, 20 bp, Artificial Sequence
  mmSKRIPTE0010917_NTC_458
  gRNA
ctcatgtacgccttcgctac

SEQ ID NO: 140139 - DNA, 20 bp, Artificial Sequence
  mmSKRIPTE0010918_NTC_459
  gRNA
ctcccatccccgtagcggcc

SEQ ID NO: 140140 - DNA, 20 bp, Artificial Sequence
  mmSKRIPTE0010919_NTC_460
  gRNA
ctccgacgactacgcaagga

SEQ ID NO: 140141 - DNA, 20 bp, Artificial Sequence
  mmSKRIPTE0010920_NTC_461
  gRNA
ctccggacgtgcatccgaga

SEQ ID NO: 140142 - DNA, 20 bp, Artificial Sequence
  mmSKRIPTE0010921_NTC_462
  gRNA
ctcctcgaggctggctacgt

SEQ ID NO: 140143 - DNA, 20 bp, Artificial Sequence
  mmSKRIPTE0010922_NTC_463
  gRNA
ctcgacccagtagtagacgg

SEQ ID NO: 140144 - DNA, 20 bp, Artificial Sequence
  mmSKRIPTE0010923_NTC_464
  gRNA
ctcgatgccacggaaggcgg

SEQ ID NO: 140145 - DNA, 20 bp, Artificial Sequence
  mmSKRIPTE0010924_NTC_465
  gRNA
ctcggacggcatacgacaat

SEQ ID NO: 140146 - DNA, 20 bp, Artificial Sequence
  mmSKRIPTE0010925_NTC_466
  gRNA
ctcggagattcgttagaaga

SEQ ID NO: 140147 - DNA, 20 bp, Artificial Sequence
  mmSKRIPTE0010926_NTC_467
  gRNA
ctcggatggtgtgttgaacc

SEQ ID NO: 140148 - DNA, 20 bp, Artificial Sequence
  mmSKRIPTE0010927_NTC_468
  gRNA
ctcggctttacgatcgatca

SEQ ID NO: 140149 - DNA, 20 bp, Artificial Sequence
  mmSKRIPTE0010928_NTC_469
  gRNA
ctcgggctattcagcgatag

SEQ ID NO: 140150 - DNA, 20 bp, Artificial Sequence
  mmSKRIPTE0010929_NTC_470
  gRNA
ctcgtatagtattgcgtggt

SEQ ID NO: 140151 - DNA, 20 bp, Artificial Sequence
  mmSKRIPTE0010930_NTC_471
  gRNA
ctcgtatcttttcccacggc

SEQ ID NO: 140152 - DNA, 20 bp, Artificial Sequence
  mmSKRIPTE0010931_NTC_472
  gRNA
ctcgtcggctttcgtgctgc

SEQ ID NO: 140153 - DNA, 20 bp, Artificial Sequence
  mmSKRIPTE0010932_NTC_473
  gRNA
ctcgtgaaacaagatccgac

SEQ ID NO: 140154 - DNA, 20 bp, Artificial Sequence
  mmSKRIPTE0010933_NTC_474
  gRNA
ctcgtgaacctgttcgcgca

SEQ ID NO: 140155 - DNA, 20 bp, Artificial Sequence
  mmSKRIPTE0010934_NTC_475
  gRNA
ctcgtgtcactcctcggttc

SEQ ID NO: 140156 - DNA, 20 bp, Artificial Sequence
  mmSKRIPTE0010935_NTC_476
  gRNA
ctctaataaaccgcacaagc

SEQ ID NO: 140157 - DNA, 20 bp, Artificial Sequence
  mmSKRIPTE0010936_NTC_477
  gRNA
ctctctgcgagtcgatgatt

SEQ ID NO: 140158 - DNA, 20 bp, Artificial Sequence
  mmSKRIPTE0010937_NTC_478
  gRNA
ctgatcggtgcatatctcgg

SEQ ID NO: 140159 - DNA, 20 bp, Artificial Sequence
  mmSKRIPTE0010938_NTC_479
  gRNA
ctgcacggcacgacatccaa

SEQ ID NO: 140160 - DNA, 20 bp, Artificial Sequence
  mmSKRIPTE0010939_NTC_480
  gRNA
ctgcgtgtaacgtgttggga

SEQ ID NO: 140161 - DNA, 20 bp, Artificial Sequence
  mmSKRIPTE0010940_NTC_481
  gRNA
ctgcttgaacgcctagacgg

SEQ ID NO: 140162 - DNA, 20 bp, Artificial Sequence
  mmSKRIPTE0010941_NTC_482
  gRNA
ctggggccgctgaaccgccg

SEQ ID NO: 140163 - DNA, 20 bp, Artificial Sequence
  mmSKRIPTE0010942_NTC_483
  gRNA
ctgtcttcaacgtctggccg

SEQ ID NO: 140164 - DNA, 20 bp, Artificial Sequence
  mmSKRIPTE0010943_NTC_484
  gRNA
cttaagttcgcgacggaatg

SEQ ID NO: 140165 - DNA, 20 bp, Artificial Sequence
  mmSKRIPTE0010944_NTC_485
  gRNA
cttatccataataggcggcg

SEQ ID NO: 140166 - DNA, 20 bp, Artificial Sequence
  mmSKRIPTE0010945_NTC_486
  gRNA
cttatcgatttgggttcaac

SEQ ID NO: 140167 - DNA, 20 bp, Artificial Sequence
  mmSKRIPTE0010946_NTC_487
  gRNA
cttcacgccttggaccgata

SEQ ID NO: 140168 - DNA, 20 bp, Artificial Sequence
  mmSKRIPTE0010947_NTC_488
  gRNA
cttgaaaaaggggcgactat

SEQ ID NO: 140169 - DNA, 20 bp, Artificial Sequence
  mmSKRIPTE0010948_NTC_489
  gRNA
cttgacacctcgtccgcatc

SEQ ID NO: 140170 - DNA, 20 bp, Artificial Sequence
  mmSKRIPTE0010949_NTC_490
  gRNA
ctttagtcacgatatacgtc

SEQ ID NO: 140171 - DNA, 20 bp, Artificial Sequence
  mmSKRIPTE0010950_NTC_491
  gRNA
ctttataccgcgcgtcggca

SEQ ID NO: 140172 - DNA, 20 bp, Artificial Sequence
  mmSKRIPTE0010951_NTC_492
  gRNA
ctttattccgttgcatgtcg

SEQ ID NO: 140173 - DNA, 20 bp, Artificial Sequence
  mmSKRIPTE0010952_NTC_493
  gRNA
ctttggcgtcgagaagcgca

SEQ ID NO: 140174 - DNA, 20 bp, Artificial Sequence
  mmSKRIPTE0010953_NTC_494
  gRNA
gaaccacgagcgagcgtata

SEQ ID NO: 140175 - DNA, 20 bp, Artificial Sequence
  mmSKRIPTE0010954_NTC_495
  gRNA
gaaccagtatctaacccgac

SEQ ID NO: 140176 - DNA, 20 bp, Artificial Sequence
  mmSKRIPTE0010955_NTC_496
  gRNA
gaacccgggaaacacgtccg

SEQ ID NO: 140177 - DNA, 20 bp, Artificial Sequence
  mmSKRIPTE0010956_NTC_497
  gRNA
gaaccggcgtgcgttagcgg

SEQ ID NO: 140178 - DNA, 20 bp, Artificial Sequence
  mmSKRIPTE0010957_NTC_498
  gRNA
gaaccttcgcgcaacttaac

SEQ ID NO: 140179 - DNA, 20 bp, Artificial Sequence
  mmSKRIPTE0010958_NTC_499
  gRNA
gaacgtaacggcatgcatca

SEQ ID NO: 140180 - DNA, 20 bp, Artificial Sequence
  mmSKRIPTE0010959_NTC_500
  gRNA
gaactcgttaggccgtgaag

SEQ ID NO: 140181 - DNA, 20 bp, Artificial Sequence
  mmSKRIPTE0010960_NTC_501
  gRNA
gaattgagccgcaactcggc

SEQ ID NO: 140182 - DNA, 20 bp, Artificial Sequence
  mmSKRIPTE0010961_NTC_502
  gRNA
gacaatcgacacgccgcttc

SEQ ID NO: 140183 - DNA, 20 bp, Artificial Sequence
  mmSKRIPTE0010962_NTC_503
  gRNA
gacagccggttgaccgggtc

SEQ ID NO: 140184 - DNA, 20 bp, Artificial Sequence
  mmSKRIPTE0010963_NTC_504
  gRNA
gacagttgacgcgacggaga

SEQ ID NO: 140185 - DNA, 20 bp, Artificial Sequence
  mmSKRIPTE0010964_NTC_505
  gRNA
gacagttggataaccgtgtc

SEQ ID NO: 140186 - DNA, 20 bp, Artificial Sequence
  mmSKRIPTE0010965_NTC_506
  gRNA
gaccaaccttacggtaactc

SEQ ID NO: 140187 - DNA, 20 bp, Artificial Sequence
  mmSKRIPTE0010966_NTC_507
  gRNA
gaccactatgtacttatcgc

SEQ ID NO: 140188 - DNA, 20 bp, Artificial Sequence
  mmSKRIPTE0010967_NTC_508
  gRNA
gaccatacgcctcgtatgcc

SEQ ID NO: 140189 - DNA, 20 bp, Artificial Sequence
  mmSKRIPTE0010968_NTC_509
  gRNA
gaccgacggtataccctact

SEQ ID NO: 140190 - DNA, 20 bp, Artificial Sequence
  mmSKRIPTE0010969_NTC_510
  gRNA
gaccggccaacggtagcggc

SEQ ID NO: 140191 - DNA, 20 bp, Artificial Sequence
  mmSKRIPTE0010970_NTC_511
  gRNA
gaccggtgtgtttacgcgtg

SEQ ID NO: 140192 - DNA, 20 bp, Artificial Sequence
  mmSKRIPTE0010971_NTC_512
  gRNA
gaccgtcgggatccttaatt

SEQ ID NO: 140193 - DNA, 20 bp, Artificial Sequence
  mmSKRIPTE0010972_NTC_513
  gRNA
gacctcgcaattgagcgctc

SEQ ID NO: 140194 - DNA, 20 bp, Artificial Sequence
  mmSKRIPTE0010973_NTC_514
  gRNA
gacgaaaggtcctacgaagt

SEQ ID NO: 140195 - DNA, 20 bp, Artificial Sequence
  mmSKRIPTE0010974_NTC_515
  gRNA
gacggtcccccctatgaaat

SEQ ID NO: 140196 - DNA, 20 bp, Artificial Sequence
  mmSKRIPTE0010975_NTC_516
  gRNA
gacgtattggattcgcaacc

SEQ ID NO: 140197 - DNA, 20 bp, Artificial Sequence
  mmSKRIPTE0010976_NTC_517
  gRNA
gacgtctaatttctggccgt

SEQ ID NO: 140198 - DNA, 20 bp, Artificial Sequence
  mmSKRIPTE0010977_NTC_518
  gRNA
gactagcacgaactgcggtt

SEQ ID NO: 140199 - DNA, 20 bp, Artificial Sequence
  mmSKRIPTE0010978_NTC_519
  gRNA
gactccgggtactaaatgtc

SEQ ID NO: 140200 - DNA, 20 bp, Artificial Sequence
  mmSKRIPTE0010979_NTC_520
  gRNA
gacttcgacgagaaaacgtt

SEQ ID NO: 140201 - DNA, 20 bp, Artificial Sequence
  mmSKRIPTE0010980_NTC_521
  gRNA
gagacccattatgatcctag

SEQ ID NO: 140202 - DNA, 20 bp, Artificial Sequence
  mmSKRIPTE0010981_NTC_522
  gRNA
gagattaaattaacgccggc

SEQ ID NO: 140203 - DNA, 20 bp, Artificial Sequence
  mmSKRIPTE0010982_NTC_523
  gRNA
gagattcgatactgcggtca

SEQ ID NO: 140204 - DNA, 20 bp, Artificial Sequence
  mmSKRIPTE0010983_NTC_524
  gRNA
gagccccaacgcgcgaagca

SEQ ID NO: 140205 - DNA, 20 bp, Artificial Sequence
  mmSKRIPTE0010984_NTC_525
  gRNA
gagcgccaagcgtgcgttga

SEQ ID NO: 140206 - DNA, 20 bp, Artificial Sequence
  mmSKRIPTE0010985_NTC_526
  gRNA
gagcgcgggccagcgaacgt

SEQ ID NO: 140207 - DNA, 20 bp, Artificial Sequence
  mmSKRIPTE0010986_NTC_527
  gRNA
gagcgtcccgtgatttaaag

SEQ ID NO: 140208 - DNA, 20 bp, Artificial Sequence
  mmSKRIPTE0010987_NTC_528
  gRNA
gagctaatctgtagacgtcg

SEQ ID NO: 140209 - DNA, 20 bp, Artificial Sequence
  mmSKRIPTE0010988_NTC_529
  gRNA
gaggacctaggttcccggat

SEQ ID NO: 140210 - DNA, 20 bp, Artificial Sequence
  mmSKRIPTE0010989_NTC_530
  gRNA
gaggcgggctcttctatcgt

SEQ ID NO: 140211 - DNA, 20 bp, Artificial Sequence
  mmSKRIPTE0010990_NTC_531
  gRNA
gaggcgtacttcggctctaa

SEQ ID NO: 140212 - DNA, 20 bp, Artificial Sequence
  mmSKRIPTE0010991_NTC_532
  gRNA
gagtcgagttaataacgctc

SEQ ID NO: 140213 - DNA, 20 bp, Artificial Sequence
  mmSKRIPTE0010992_NTC_533
  gRNA
gataagactccgcgagcttc

SEQ ID NO: 140214 - DNA, 20 bp, Artificial Sequence
  mmSKRIPTE0010993_NTC_534
  gRNA
gatacgtgaggttgccggtg

SEQ ID NO: 140215 - DNA, 20 bp, Artificial Sequence
  mmSKRIPTE0010994_NTC_535
  gRNA
gatagaacaacagcggtgca

SEQ ID NO: 140216 - DNA, 20 bp, Artificial Sequence
  mmSKRIPTE0010995_NTC_536
  gRNA
gatatttaccggcgataaga

SEQ ID NO: 140217 - DNA, 20 bp, Artificial Sequence
  mmSKRIPTE0010996_NTC_537
  gRNA
gatcactcccgaaagtagtg

SEQ ID NO: 140218 - DNA, 20 bp, Artificial Sequence
  mmSKRIPTE0010997_NTC_538
  gRNA
gatcccctacgcttcaacct

SEQ ID NO: 140219 - DNA, 20 bp, Artificial Sequence
  mmSKRIPTE0010998_NTC_539
  gRNA
gatcgagtgacacccacccg

SEQ ID NO: 140220 - DNA, 20 bp, Artificial Sequence
  mmSKRIPTE0010999_NTC_540
  gRNA
gatcttaccactcgtcgtag

SEQ ID NO: 140221 - DNA, 20 bp, Artificial Sequence
  mmSKRIPTE0011000_NTC_541
  gRNA
gatgcggacccacgttaagc

SEQ ID NO: 140222 - DNA, 20 bp, Artificial Sequence
  mmSKRIPTE0011001_NTC_542
  gRNA
gatgcgggtggaaaacgtta

SEQ ID NO: 140223 - DNA, 20 bp, Artificial Sequence
  mmSKRIPTE0011002_NTC_543
  gRNA
gatggccagtaacggcgtca

SEQ ID NO: 140224 - DNA, 20 bp, Artificial Sequence
  mmSKRIPTE0011003_NTC_544
  gRNA
gattacggggttccgtaact

SEQ ID NO: 140225 - DNA, 20 bp, Artificial Sequence
  mmSKRIPTE0011004_NTC_545
  gRNA
gattcattatcggcatacgg

SEQ ID NO: 140226 - DNA, 20 bp, Artificial Sequence
  mmSKRIPTE0011005_NTC_546
  gRNA
gattccgtatagtaatcgag

SEQ ID NO: 140227 - DNA, 20 bp, Artificial Sequence
  mmSKRIPTE0011006_NTC_547
  gRNA
gattgagaagccgcggtatc

SEQ ID NO: 140228 - DNA, 20 bp, Artificial Sequence
  mmSKRIPTE0011007_NTC_548
  gRNA
gattggacggtcgcaggata

SEQ ID NO: 140229 - DNA, 20 bp, Artificial Sequence
  mmSKRIPTE0011008_NTC_549
  gRNA
gatttctcgtatcggataac

SEQ ID NO: 140230 - DNA, 20 bp, Artificial Sequence
  mmSKRIPTE0011009_NTC_550
  gRNA
gcaaaaagcggacacgcgac

SEQ ID NO: 140231 - DNA, 20 bp, Artificial Sequence
  mmSKRIPTE0011010_NTC_551
  gRNA
gcaaataggtcggagcgtgt

SEQ ID NO: 140232 - DNA, 20 bp, Artificial Sequence
  mmSKRIPTE0011011_NTC_552
  gRNA
gcaacccacggacggcaccg

SEQ ID NO: 140233 - DNA, 20 bp, Artificial Sequence
  mmSKRIPTE0011012_NTC_553
  gRNA
gcaacggacagtcatcgaac

SEQ ID NO: 140234 - DNA, 20 bp, Artificial Sequence
  mmSKRIPTE0011013_NTC_554
  gRNA
gcaatagtcgcacgggtgat

SEQ ID NO: 140235 - DNA, 20 bp, Artificial Sequence
  mmSKRIPTE0011014_NTC_555
  gRNA
gcaattctgcaacgcacgtc

SEQ ID NO: 140236 - DNA, 20 bp, Artificial Sequence
  mmSKRIPTE0011015_NTC_556
  gRNA
gcacctctagcgcgctcggc

SEQ ID NO: 140237 - DNA, 20 bp, Artificial Sequence
  mmSKRIPTE0011016_NTC_557
  gRNA
gcacgaacccgttcgtatgg

SEQ ID NO: 140238 - DNA, 20 bp, Artificial Sequence
  mmSKRIPTE0011017_NTC_558
  gRNA
gcagagcgtaatcggcatcg

SEQ ID NO: 140239 - DNA, 20 bp, Artificial Sequence
  mmSKRIPTE0011018_NTC_559
  gRNA
gcagggttattccgcttcta

SEQ ID NO: 140240 - DNA, 20 bp, Artificial Sequence
  mmSKRIPTE0011019_NTC_560
  gRNA
gcaggtaggctcgatacttg

SEQ ID NO: 140241 - DNA, 20 bp, Artificial Sequence
  mmSKRIPTE0011020_NTC_561
  gRNA
gcataacggccgagcaccac

SEQ ID NO: 140242 - DNA, 20 bp, Artificial Sequence
  mmSKRIPTE0011021_NTC_562
  gRNA
gcatgcgctcgcgtggactg

SEQ ID NO: 140243 - DNA, 20 bp, Artificial Sequence
  mmSKRIPTE0011022_NTC_563
  gRNA
gcattaagacgcccacatat

SEQ ID NO: 140244 - DNA, 20 bp, Artificial Sequence
  mmSKRIPTE0011023_NTC_564
  gRNA
gcattcccgcttacgtaatt

SEQ ID NO: 140245 - DNA, 20 bp, Artificial Sequence
  mmSKRIPTE0011024_NTC_565
  gRNA
gcattcttgagctccgcgcc

SEQ ID NO: 140246 - DNA, 20 bp, Artificial Sequence
  mmSKRIPTE0011025_NTC_566
  gRNA
gcattggtgctcgcgcgttc

SEQ ID NO: 140247 - DNA, 20 bp, Artificial Sequence
  mmSKRIPTE0011026_NTC_567
  gRNA
gccacgacctgcgaataatt

SEQ ID NO: 140248 - DNA, 20 bp, Artificial Sequence
  mmSKRIPTE0011027_NTC_568
  gRNA
gccactccgctcgttctaga

SEQ ID NO: 140249 - DNA, 20 bp, Artificial Sequence
  mmSKRIPTE0011028_NTC_569
  gRNA
gccagcctcggtataactcg

SEQ ID NO: 140250 - DNA, 20 bp, Artificial Sequence
  mmSKRIPTE0011029_NTC_570
  gRNA
gccatagccaatcgctagtt

SEQ ID NO: 140251 - DNA, 20 bp, Artificial Sequence
  mmSKRIPTE0011030_NTC_571
  gRNA
gcccatgacgcgtgttagta

SEQ ID NO: 140252 - DNA, 20 bp, Artificial Sequence
  mmSKRIPTE0011031_NTC_572
  gRNA
gcccgacctccacgtaaatc

SEQ ID NO: 140253 - DNA, 20 bp, Artificial Sequence
  mmSKRIPTE0011032_NTC_573
  gRNA
gcccgagcggattcaccgcg

SEQ ID NO: 140254 - DNA, 20 bp, Artificial Sequence
  mmSKRIPTE0011033_NTC_574
  gRNA
gcccgatagaattacccatt

SEQ ID NO: 140255 - DNA, 20 bp, Artificial Sequence
  mmSKRIPTE0011034_NTC_575
  gRNA
gcccgttgtgagcggcatgc

SEQ ID NO: 140256 - DNA, 20 bp, Artificial Sequence
  mmSKRIPTE0011035_NTC_576
  gRNA
gccctcgagctcacgatgag

SEQ ID NO: 140257 - DNA, 20 bp, Artificial Sequence
  mmSKRIPTE0011036_NTC_577
  gRNA
gccgaatcgcgttattccaa

SEQ ID NO: 140258 - DNA, 20 bp, Artificial Sequence
  mmSKRIPTE0011037_NTC_578
  gRNA
gccgaccaacgatgaccacg

SEQ ID NO: 140259 - DNA, 20 bp, Artificial Sequence
  mmSKRIPTE0011038_NTC_579
  gRNA
gccgagaggcgtaagcgcga

SEQ ID NO: 140260 - DNA, 20 bp, Artificial Sequence
  mmSKRIPTE0011039_NTC_580
  gRNA
gccgcaacgttagatgtata

SEQ ID NO: 140261 - DNA, 20 bp, Artificial Sequence
  mmSKRIPTE0011040_NTC_581
  gRNA
gccgcgccataatatgccat

SEQ ID NO: 140262 - DNA, 20 bp, Artificial Sequence
  mmSKRIPTE0011041_NTC_582
  gRNA
gccgctcttgataacgacgc

SEQ ID NO: 140263 - DNA, 20 bp, Artificial Sequence
  mmSKRIPTE0011042_NTC_583
  gRNA
gccgtaagcgggccggttga

SEQ ID NO: 140264 - DNA, 20 bp, Artificial Sequence
  mmSKRIPTE0011043_NTC_584
  gRNA
gccgttggaaaactccggcc

SEQ ID NO: 140265 - DNA, 20 bp, Artificial Sequence
  mmSKRIPTE0011044_NTC_585
  gRNA
gcctatgtgaatcgcgaatt

SEQ ID NO: 140266 - DNA, 20 bp, Artificial Sequence
  mmSKRIPTE0011045_NTC_586
  gRNA
gccttcctcgcagacccgac

SEQ ID NO: 140267 - DNA, 20 bp, Artificial Sequence
  mmSKRIPTE0011046_NTC_587
  gRNA
gccttttccgcccgttcaag

SEQ ID NO: 140268 - DNA, 20 bp, Artificial Sequence
  mmSKRIPTE0011047_NTC_588
  gRNA
gcgacaagcgttgagttcgc

SEQ ID NO: 140269 - DNA, 20 bp, Artificial Sequence
  mmSKRIPTE0011048_NTC_589
  gRNA
gcgacgtgtatcgatcactc

SEQ ID NO: 140270 - DNA, 20 bp, Artificial Sequence
  mmSKRIPTE0011049_NTC_590
  gRNA
gcgagcgctatcccggtgga

SEQ ID NO: 140271 - DNA, 20 bp, Artificial Sequence
  mmSKRIPTE0011050_NTC_591
  gRNA
gcgaggtattcggctccgcg

SEQ ID NO: 140272 - DNA, 20 bp, Artificial Sequence
  mmSKRIPTE0011051_NTC_592
  gRNA
gcgagttatttcgctatagg

SEQ ID NO: 140273 - DNA, 20 bp, Artificial Sequence
  mmSKRIPTE0011052_NTC_593
  gRNA
gcgatcgccggtatagcttt

SEQ ID NO: 140274 - DNA, 20 bp, Artificial Sequence
  mmSKRIPTE0011053_NTC_594
  gRNA
gcgattatcagtagtccacg

SEQ ID NO: 140275 - DNA, 20 bp, Artificial Sequence
  mmSKRIPTE0011054_NTC_595
  gRNA
gcgcctagggttccgactca

SEQ ID NO: 140276 - DNA, 20 bp, Artificial Sequence
  mmSKRIPTE0011055_NTC_596
  gRNA
gcgcgagggcaccgacaagt

SEQ ID NO: 140277 - DNA, 20 bp, Artificial Sequence
  mmSKRIPTE0011056_NTC_597
  gRNA
gcgcgagtgccaaacgagtg

SEQ ID NO: 140278 - DNA, 20 bp, Artificial Sequence
  mmSKRIPTE0011057_NTC_598
  gRNA
gcgcgcgtggatcacccgca

SEQ ID NO: 140279 - DNA, 20 bp, Artificial Sequence
  mmSKRIPTE0011058_NTC_599
  gRNA
gcgcgtacatataaataggt

SEQ ID NO: 140280 - DNA, 20 bp, Artificial Sequence
  mmSKRIPTE0011059_NTC_600
  gRNA
gcgctactcccaccgatgtt

SEQ ID NO: 140281 - DNA, 20 bp, Artificial Sequence
  mmSKRIPTE0011060_NTC_601
  gRNA
gcgctcgaacaaacatggtc

SEQ ID NO: 140282 - DNA, 20 bp, Artificial Sequence
  mmSKRIPTE0011061_NTC_602
  gRNA
gcgctcgttcgagacgatct

SEQ ID NO: 140283 - DNA, 20 bp, Artificial Sequence
  mmSKRIPTE0011062_NTC_603
  gRNA
gcggatctgacggttactta

SEQ ID NO: 140284 - DNA, 20 bp, Artificial Sequence
  mmSKRIPTE0011063_NTC_604
  gRNA
gcggcccgtgaccgttcaat

SEQ ID NO: 140285 - DNA, 20 bp, Artificial Sequence
  mmSKRIPTE0011064_NTC_605
  gRNA
gcgggacccccggtatagtc

SEQ ID NO: 140286 - DNA, 20 bp, Artificial Sequence
  mmSKRIPTE0011065_NTC_606
  gRNA
gcggttaccgcgaaaaccat

SEQ ID NO: 140287 - DNA, 20 bp, Artificial Sequence
  mmSKRIPTE0011066_NTC_607
  gRNA
gcgtacctatcgataaacca

SEQ ID NO: 140288 - DNA, 20 bp, Artificial Sequence
  mmSKRIPTE0011067_NTC_608
  gRNA
gcgtatctaccctaccgccg

SEQ ID NO: 140289 - DNA, 20 bp, Artificial Sequence
  mmSKRIPTE0011068_NTC_609
  gRNA
gcgtgacgcgatcaaacggt

SEQ ID NO: 140290 - DNA, 20 bp, Artificial Sequence
  mmSKRIPTE0011069_NTC_610
  gRNA
gcgtgacgtcccaccctgag

SEQ ID NO: 140291 - DNA, 20 bp, Artificial Sequence
  mmSKRIPTE0011070_NTC_611
  gRNA
gcgtgagattcgttgctcga

SEQ ID NO: 140292 - DNA, 20 bp, Artificial Sequence
  mmSKRIPTE0011071_NTC_612
  gRNA
gcgtgccatgggaggccgtt

SEQ ID NO: 140293 - DNA, 20 bp, Artificial Sequence
  mmSKRIPTE0011072_NTC_613
  gRNA
gcgtggagttcgtcgctctt

SEQ ID NO: 140294 - DNA, 20 bp, Artificial Sequence
  mmSKRIPTE0011073_NTC_614
  gRNA
gcgtggtactcacatcgcga

SEQ ID NO: 140295 - DNA, 20 bp, Artificial Sequence
  mmSKRIPTE0011074_NTC_615
  gRNA
gctaaaaacaaccggcgcgg

SEQ ID NO: 140296 - DNA, 20 bp, Artificial Sequence
  mmSKRIPTE0011075_NTC_616
  gRNA
gctaaacgtattttacgggc

SEQ ID NO: 140297 - DNA, 20 bp, Artificial Sequence
  mmSKRIPTE0011076_NTC_617
  gRNA
gctaagattcatccgaacac

SEQ ID NO: 140298 - DNA, 20 bp, Artificial Sequence
  mmSKRIPTE0011077_NTC_618
  gRNA
gctaatcggtactactccgg

SEQ ID NO: 140299 - DNA, 20 bp, Artificial Sequence
  mmSKRIPTE0011078_NTC_619
  gRNA
gctacagatttgcgttcgag

SEQ ID NO: 140300 - DNA, 20 bp, Artificial Sequence
  mmSKRIPTE0011079_NTC_620
  gRNA
gctagcgttcagcccgatgt

SEQ ID NO: 140301 - DNA, 20 bp, Artificial Sequence
  mmSKRIPTE0011080_NTC_621
  gRNA
gctagttctcccgggcgaaa

SEQ ID NO: 140302 - DNA, 20 bp, Artificial Sequence
  mmSKRIPTE0011081_NTC_622
  gRNA
gctattccgctcgtcaattt

SEQ ID NO: 140303 - DNA, 20 bp, Artificial Sequence
  mmSKRIPTE0011082_NTC_623
  gRNA
gctcatactgatgaacgtcc

SEQ ID NO: 140304 - DNA, 20 bp, Artificial Sequence
  mmSKRIPTE0011083_NTC_624
  gRNA
gctccaggtgcgagataggc

SEQ ID NO: 140305 - DNA, 20 bp, Artificial Sequence
  mmSKRIPTE0011084_NTC_625
  gRNA
gctcgaaagtacgcttcctt

SEQ ID NO: 140306 - DNA, 20 bp, Artificial Sequence
  mmSKRIPTE0011085_NTC_626
  gRNA
gctcgctgatgtgtaatccg

SEQ ID NO: 140307 - DNA, 20 bp, Artificial Sequence
  mmSKRIPTE0011086_NTC_627
  gRNA
gctcggaccttttagacgtc

SEQ ID NO: 140308 - DNA, 20 bp, Artificial Sequence
  mmSKRIPTE0011087_NTC_628
  gRNA
gctgattagacccggcgtaa

SEQ ID NO: 140309 - DNA, 20 bp, Artificial Sequence
  mmSKRIPTE0011088_NTC_629
  gRNA
gcttacctactccgccccgc

SEQ ID NO: 140310 - DNA, 20 bp, Artificial Sequence
  mmSKRIPTE0011089_NTC_630
  gRNA
gcttatcgtcatgcgggtga

SEQ ID NO: 140311 - DNA, 20 bp, Artificial Sequence
  mmSKRIPTE0011090_NTC_631
  gRNA
gcttatcgttccgctacgat

SEQ ID NO: 140312 - DNA, 20 bp, Artificial Sequence
  mmSKRIPTE0011091_NTC_632
  gRNA
gcttcattattaaccggcgt

SEQ ID NO: 140313 - DNA, 20 bp, Artificial Sequence
  mmSKRIPTE0011092_NTC_633
  gRNA
gcttcgaccacgggtactgc

SEQ ID NO: 140314 - DNA, 20 bp, Artificial Sequence
  mmSKRIPTE0011093_NTC_634
  gRNA
gcttcggaggctacgtagta

SEQ ID NO: 140315 - DNA, 20 bp, Artificial Sequence
  mmSKRIPTE0011094_NTC_635
  gRNA
gcttctactcgcaacgtatt

SEQ ID NO: 140316 - DNA, 20 bp, Artificial Sequence
  mmSKRIPTE0011095_NTC_636
  gRNA
gcttgaggcaacgcgactga

SEQ ID NO: 140317 - DNA, 20 bp, Artificial Sequence
  mmSKRIPTE0011096_NTC_637
  gRNA
gcttgtaatctaaagacgcg

SEQ ID NO: 140318 - DNA, 20 bp, Artificial Sequence
  mmSKRIPTE0011097_NTC_638
  gRNA
gctttcacggaggttcgacg

SEQ ID NO: 140319 - DNA, 20 bp, Artificial Sequence
  mmSKRIPTE0011098_NTC_639
  gRNA
ggaaacgttacattcgacgc

SEQ ID NO: 140320 - DNA, 20 bp, Artificial Sequence
  mmSKRIPTE0011099_NTC_640
  gRNA
ggaaactcttgctcgacacg

SEQ ID NO: 140321 - DNA, 20 bp, Artificial Sequence
  mmSKRIPTE0011100_NTC_641
  gRNA
ggacactcgccgaccccact

SEQ ID NO: 140322 - DNA, 20 bp, Artificial Sequence
  mmSKRIPTE0011101_NTC_642
  gRNA
ggaccaatgttaccgtaggt

SEQ ID NO: 140323 - DNA, 20 bp, Artificial Sequence
  mmSKRIPTE0011102_NTC_643
  gRNA
ggacggatgggacgactagt

SEQ ID NO: 140324 - DNA, 20 bp, Artificial Sequence
  mmSKRIPTE0011103_NTC_644
  gRNA
ggacgtagattagggcgtaa

SEQ ID NO: 140325 - DNA, 20 bp, Artificial Sequence
  mmSKRIPTE0011104_NTC_645
  gRNA
ggactgaaaccgatagtatc

SEQ ID NO: 140326 - DNA, 20 bp, Artificial Sequence
  mmSKRIPTE0011105_NTC_646
  gRNA
ggagtctcacgcaattagcg

SEQ ID NO: 140327 - DNA, 20 bp, Artificial Sequence
  mmSKRIPTE0011106_NTC_647
  gRNA
ggagttcaagcgtaacttcg

SEQ ID NO: 140328 - DNA, 20 bp, Artificial Sequence
  mmSKRIPTE0011107_NTC_648
  gRNA
ggatacatcggcgcgctagt

SEQ ID NO: 140329 - DNA, 20 bp, Artificial Sequence
  mmSKRIPTE0011108_NTC_649
  gRNA
ggatagcccggttggtgcgt

SEQ ID NO: 140330 - DNA, 20 bp, Artificial Sequence
  mmSKRIPTE0011109_NTC_650
  gRNA
ggatattcgcgcggtcttca

SEQ ID NO: 140331 - DNA, 20 bp, Artificial Sequence
  mmSKRIPTE0011110_NTC_651
  gRNA
ggatcgatccgaggaacgtg

SEQ ID NO: 140332 - DNA, 20 bp, Artificial Sequence
  mmSKRIPTE0011111_NTC_652
  gRNA
ggattcgtgcgggagatacg

SEQ ID NO: 140333 - DNA, 20 bp, Artificial Sequence
  mmSKRIPTE0011112_NTC_653
  gRNA
ggattgacgagacgatatcg

SEQ ID NO: 140334 - DNA, 20 bp, Artificial Sequence
  mmSKRIPTE0011113_NTC_654
  gRNA
ggcaacgcacgctgggttgt

SEQ ID NO: 140335 - DNA, 20 bp, Artificial Sequence
  mmSKRIPTE0011114_NTC_655
  gRNA
ggcaccgcgtttattgcact

SEQ ID NO: 140336 - DNA, 20 bp, Artificial Sequence
  mmSKRIPTE0011115_NTC_656
  gRNA
ggcaccgttcggaaaccgac

SEQ ID NO: 140337 - DNA, 20 bp, Artificial Sequence
  mmSKRIPTE0011116_NTC_657
  gRNA
ggcagcctaatcagtcgagg

SEQ ID NO: 140338 - DNA, 20 bp, Artificial Sequence
  mmSKRIPTE0011117_NTC_658
  gRNA
ggccagtgtggccgttacgc

SEQ ID NO: 140339 - DNA, 20 bp, Artificial Sequence
  mmSKRIPTE0011118_NTC_659
  gRNA
ggcccaacgaaactagcgtg

SEQ ID NO: 140340 - DNA, 20 bp, Artificial Sequence
  mmSKRIPTE0011119_NTC_660
  gRNA
ggcccgaagggtcacaagcg

SEQ ID NO: 140341 - DNA, 20 bp, Artificial Sequence
  mmSKRIPTE0011120_NTC_661
  gRNA
ggcgctactgtaatgacggt

SEQ ID NO: 140342 - DNA, 20 bp, Artificial Sequence
  mmSKRIPTE0011121_NTC_662
  gRNA
ggcgggttaggccccgtttt

SEQ ID NO: 140343 - DNA, 20 bp, Artificial Sequence
  mmSKRIPTE0011122_NTC_663
  gRNA
ggcgtcgtaacaagaacttg

SEQ ID NO: 140344 - DNA, 20 bp, Artificial Sequence
  mmSKRIPTE0011123_NTC_664
  gRNA
ggcttatagacgagactcga

SEQ ID NO: 140345 - DNA, 20 bp, Artificial Sequence
  mmSKRIPTE0011124_NTC_665
  gRNA
ggctttacgtaaggagcgta

SEQ ID NO: 140346 - DNA, 20 bp, Artificial Sequence
  mmSKRIPTE0011125_NTC_666
  gRNA
gggacgctcatcgagtgacg

SEQ ID NO: 140347 - DNA, 20 bp, Artificial Sequence
  mmSKRIPTE0011126_NTC_667
  gRNA
gggcaacgtcatctggcgac

SEQ ID NO: 140348 - DNA, 20 bp, Artificial Sequence
  mmSKRIPTE0011127_NTC_668
  gRNA
gggccggcactctgtcggac

SEQ ID NO: 140349 - DNA, 20 bp, Artificial Sequence
  mmSKRIPTE0011128_NTC_669
  gRNA
gggcgcgtcatagacacacg

SEQ ID NO: 140350 - DNA, 20 bp, Artificial Sequence
  mmSKRIPTE0011129_NTC_670
  gRNA
gggcgggacgtaatattatg

SEQ ID NO: 140351 - DNA, 20 bp, Artificial Sequence
  mmSKRIPTE0011130_NTC_671
  gRNA
gggctagtgcgttgttacga

SEQ ID NO: 140352 - DNA, 20 bp, Artificial Sequence
  mmSKRIPTE0011131_NTC_672
  gRNA
ggggatggccttacgtcgcg

SEQ ID NO: 140353 - DNA, 20 bp, Artificial Sequence
  mmSKRIPTE0011132_NTC_673
  gRNA
ggggggtctaataccgattg

SEQ ID NO: 140354 - DNA, 20 bp, Artificial Sequence
  mmSKRIPTE0011133_NTC_674
  gRNA
ggggtaggcctaattacgga

SEQ ID NO: 140355 - DNA, 20 bp, Artificial Sequence
  mmSKRIPTE0011134_NTC_675
  gRNA
ggggttggatacgcgattta

SEQ ID NO: 140356 - DNA, 20 bp, Artificial Sequence
  mmSKRIPTE0011135_NTC_676
  gRNA
gggtagcaccccgccgacac

SEQ ID NO: 140357 - DNA, 20 bp, Artificial Sequence
  mmSKRIPTE0011136_NTC_677
  gRNA
gggtcgcaccccaatagctg

SEQ ID NO: 140358 - DNA, 20 bp, Artificial Sequence
  mmSKRIPTE0011137_NTC_678
  gRNA
gggtgcacacgccggcctat

SEQ ID NO: 140359 - DNA, 20 bp, Artificial Sequence
  mmSKRIPTE0011138_NTC_679
  gRNA
ggtaaaaagcgtaacgagta

SEQ ID NO: 140360 - DNA, 20 bp, Artificial Sequence
  mmSKRIPTE0011139_NTC_680
  gRNA
ggtaacataggcggcgatct

SEQ ID NO: 140361 - DNA, 20 bp, Artificial Sequence
  mmSKRIPTE0011140_NTC_681
  gRNA
ggtcaaagcgatgttagccg

SEQ ID NO: 140362 - DNA, 20 bp, Artificial Sequence
  mmSKRIPTE0011141_NTC_682
  gRNA
ggtcgctcgatttcatttaa

SEQ ID NO: 140363 - DNA, 20 bp, Artificial Sequence
  mmSKRIPTE0011142_NTC_683
  gRNA
ggtctagataatcttaccga

SEQ ID NO: 140364 - DNA, 20 bp, Artificial Sequence
  mmSKRIPTE0011143_NTC_684
  gRNA
ggtctcgtaatgtcctatat

SEQ ID NO: 140365 - DNA, 20 bp, Artificial Sequence
  mmSKRIPTE0011144_NTC_685
  gRNA
ggtctgtccgttgcgaccac

SEQ ID NO: 140366 - DNA, 20 bp, Artificial Sequence
  mmSKRIPTE0011145_NTC_686
  gRNA
ggtgcagtccgtttagtcgg

SEQ ID NO: 140367 - DNA, 20 bp, Artificial Sequence
  mmSKRIPTE0011146_NTC_687
  gRNA
ggtgtggaccgcttttacgc

SEQ ID NO: 140368 - DNA, 20 bp, Artificial Sequence
  mmSKRIPTE0011147_NTC_688
  gRNA
ggttaaaaattaagcggtcc

SEQ ID NO: 140369 - DNA, 20 bp, Artificial Sequence
  mmSKRIPTE0011148_NTC_689
  gRNA
gtacatgcggcaagtcgact

SEQ ID NO: 140370 - DNA, 20 bp, Artificial Sequence
  mmSKRIPTE0011149_NTC_690
  gRNA
gtaccacttatcgaccttgc

SEQ ID NO: 140371 - DNA, 20 bp, Artificial Sequence
  mmSKRIPTE0011150_NTC_691
  gRNA
gtaccatgataaccgtacta

SEQ ID NO: 140372 - DNA, 20 bp, Artificial Sequence
  mmSKRIPTE0011151_NTC_692
  gRNA
gtacgcagggtgtagcgacc

SEQ ID NO: 140373 - DNA, 20 bp, Artificial Sequence
  mmSKRIPTE0011152_NTC_693
  gRNA
gtactgacgttacgttcata

SEQ ID NO: 140374 - DNA, 20 bp, Artificial Sequence
  mmSKRIPTE0011153_NTC_694
  gRNA
gtagacatattgcgtaatcg

SEQ ID NO: 140375 - DNA, 20 bp, Artificial Sequence
  mmSKRIPTE0011154_NTC_695
  gRNA
gtagctgaccgcttaactaa

SEQ ID NO: 140376 - DNA, 20 bp, Artificial Sequence
  mmSKRIPTE0011155_NTC_696
  gRNA
gtagcttcatgtccggtcgg

SEQ ID NO: 140377 - DNA, 20 bp, Artificial Sequence
  mmSKRIPTE0011156_NTC_697
  gRNA
gtaggccgctgatcgaataa

SEQ ID NO: 140378 - DNA, 20 bp, Artificial Sequence
  mmSKRIPTE0011157_NTC_698
  gRNA
gtagtgcgtgtgatgtcggg

SEQ ID NO: 140379 - DNA, 20 bp, Artificial Sequence
  mmSKRIPTE0011158_NTC_699
  gRNA
gtatcctccttacggcccgt

SEQ ID NO: 140380 - DNA, 20 bp, Artificial Sequence
  mmSKRIPTE0011159_NTC_700
  gRNA
gtatcctcgcaatcgttagg

SEQ ID NO: 140381 - DNA, 20 bp, Artificial Sequence
  mmSKRIPTE0011160_NTC_701
  gRNA
gtcaagccgaacgctgccgg

SEQ ID NO: 140382 - DNA, 20 bp, Artificial Sequence
  mmSKRIPTE0011161_NTC_702
  gRNA
gtcacaaaaaacgagcgtta

SEQ ID NO: 140383 - DNA, 20 bp, Artificial Sequence
  mmSKRIPTE0011162_NTC_703
  gRNA
gtcctagatcctatcgggag

SEQ ID NO: 140384 - DNA, 20 bp, Artificial Sequence
  mmSKRIPTE0011163_NTC_704
  gRNA
gtcgattagatgatgcccgg

SEQ ID NO: 140385 - DNA, 20 bp, Artificial Sequence
  mmSKRIPTE0011164_NTC_705
  gRNA
gtcgcgtatcctgacgacac

SEQ ID NO: 140386 - DNA, 20 bp, Artificial Sequence
  mmSKRIPTE0011165_NTC_706
  gRNA
gtcgctcgaactcacgtagc

SEQ ID NO: 140387 - DNA, 20 bp, Artificial Sequence
  mmSKRIPTE0011166_NTC_707
  gRNA
gtcggccgcttaaccctttc

SEQ ID NO: 140388 - DNA, 20 bp, Artificial Sequence
  mmSKRIPTE0011167_NTC_708
  gRNA
gtcggctcatcggaaaatat

SEQ ID NO: 140389 - DNA, 20 bp, Artificial Sequence
  mmSKRIPTE0011168_NTC_709
  gRNA
gtcgtggggcacgatgcgta

SEQ ID NO: 140390 - DNA, 20 bp, Artificial Sequence
  mmSKRIPTE0011169_NTC_710
  gRNA
gtcgttaacgacccggattc

SEQ ID NO: 140391 - DNA, 20 bp, Artificial Sequence
  mmSKRIPTE0011170_NTC_711
  gRNA
gtctaacatcggcgcacgtg

SEQ ID NO: 140392 - DNA, 20 bp, Artificial Sequence
  mmSKRIPTE0011171_NTC_712
  gRNA
gtgatggccacgtccgaacc

SEQ ID NO: 140393 - DNA, 20 bp, Artificial Sequence
  mmSKRIPTE0011172_NTC_713
  gRNA
gtgcaacgactgacccgcgg

SEQ ID NO: 140394 - DNA, 20 bp, Artificial Sequence
  mmSKRIPTE0011173_NTC_714
  gRNA
gtgccagcgtcgattgacgc

SEQ ID NO: 140395 - DNA, 20 bp, Artificial Sequence
  mmSKRIPTE0011174_NTC_715
  gRNA
gtgcctgatagtgtgaagcg

SEQ ID NO: 140396 - DNA, 20 bp, Artificial Sequence
  mmSKRIPTE0011175_NTC_716
  gRNA
gtgcgaattaaccgttagga

SEQ ID NO: 140397 - DNA, 20 bp, Artificial Sequence
  mmSKRIPTE0011176_NTC_717
  gRNA
gtgcgcgcgtatagaaaaaa

SEQ ID NO: 140398 - DNA, 20 bp, Artificial Sequence
  mmSKRIPTE0011177_NTC_718
  gRNA
gtgggctgaccgttctcgac

SEQ ID NO: 140399 - DNA, 20 bp, Artificial Sequence
  mmSKRIPTE0011178_NTC_719
  gRNA
gtggttacgttaacgactac

SEQ ID NO: 140400 - DNA, 20 bp, Artificial Sequence
  mmSKRIPTE0011179_NTC_720
  gRNA
gtgtatgacgagaagcgaag

SEQ ID NO: 140401 - DNA, 20 bp, Artificial Sequence
  mmSKRIPTE0011180_NTC_721
  gRNA
gtgtctttcggtcttacgag

SEQ ID NO: 140402 - DNA, 20 bp, Artificial Sequence
  mmSKRIPTE0011181_NTC_722
  gRNA
gtgtgcctcgacagcgtaag

SEQ ID NO: 140403 - DNA, 20 bp, Artificial Sequence
  mmSKRIPTE0011182_NTC_723
  gRNA
gtgtggtatatccccgtttt

SEQ ID NO: 140404 - DNA, 20 bp, Artificial Sequence
  mmSKRIPTE0011183_NTC_724
  gRNA
gtgttgtccgagaacccgac

SEQ ID NO: 140405 - DNA, 20 bp, Artificial Sequence
  mmSKRIPTE0011184_NTC_725
  gRNA
gttaagtagatcggtgacat

SEQ ID NO: 140406 - DNA, 20 bp, Artificial Sequence
  mmSKRIPTE0011185_NTC_726
  gRNA
gttaatattgtggcccgcac

SEQ ID NO: 140407 - DNA, 20 bp, Artificial Sequence
  mmSKRIPTE0011186_NTC_727
  gRNA
gttacccctttggccggaag

SEQ ID NO: 140408 - DNA, 20 bp, Artificial Sequence
  mmSKRIPTE0011187_NTC_728
  gRNA
gttaccgtgacgataagaat

SEQ ID NO: 140409 - DNA, 20 bp, Artificial Sequence
  mmSKRIPTE0011188_NTC_729
  gRNA
gttacttacctgaccggcaa

SEQ ID NO: 140410 - DNA, 20 bp, Artificial Sequence
  mmSKRIPTE0011189_NTC_730
  gRNA
gttataccacctactatgac

SEQ ID NO: 140411 - DNA, 20 bp, Artificial Sequence
  mmSKRIPTE0011190_NTC_731
  gRNA
gttattgcgccttggccgta

SEQ ID NO: 140412 - DNA, 20 bp, Artificial Sequence
  mmSKRIPTE0011191_NTC_732
  gRNA
gttatttgtctgtcgaaacg

SEQ ID NO: 140413 - DNA, 20 bp, Artificial Sequence
  mmSKRIPTE0011192_NTC_733
  gRNA
gttccggatatatacggtta

SEQ ID NO: 140414 - DNA, 20 bp, Artificial Sequence
  mmSKRIPTE0011193_NTC_734
  gRNA
gttcgcgggggcttctatca

SEQ ID NO: 140415 - DNA, 20 bp, Artificial Sequence
  mmSKRIPTE0011194_NTC_735
  gRNA
gttcggttgcagcttacacg

SEQ ID NO: 140416 - DNA, 20 bp, Artificial Sequence
  mmSKRIPTE0011195_NTC_736
  gRNA
gttcttcaaagacgggcggc

SEQ ID NO: 140417 - DNA, 20 bp, Artificial Sequence
  mmSKRIPTE0011196_NTC_737
  gRNA
gttgcggcgacctagatatc

SEQ ID NO: 140418 - DNA, 20 bp, Artificial Sequence
  mmSKRIPTE0011197_NTC_738
  gRNA
gttgcgtccattccgtcgcc

SEQ ID NO: 140419 - DNA, 20 bp, Artificial Sequence
  mmSKRIPTE0011198_NTC_739
  gRNA
gttgcgtgtgtccgtacaaa

SEQ ID NO: 140420 - DNA, 20 bp, Artificial Sequence
  mmSKRIPTE0011199_NTC_740
  gRNA
gtttcagcgcgagttgcgcg

SEQ ID NO: 140421 - DNA, 20 bp, Artificial Sequence
  mmSKRIPTE0011200_NTC_741
  gRNA
gtttcaggaacgacggcgag

SEQ ID NO: 140422 - DNA, 20 bp, Artificial Sequence
  mmSKRIPTE0011201_NTC_742
  gRNA
gtttcccgggactgtcgcgt

SEQ ID NO: 140423 - DNA, 20 bp, Artificial Sequence
  mmSKRIPTE0011202_NTC_743
  gRNA
gtttgcgagtcaaagtacgc

SEQ ID NO: 140424 - DNA, 20 bp, Artificial Sequence
  mmSKRIPTE0011203_NTC_744
  gRNA
taaaaacgctggcggcctag

SEQ ID NO: 140425 - DNA, 20 bp, Artificial Sequence
  mmSKRIPTE0011204_NTC_745
  gRNA
taaaaccgatcacgatacga

SEQ ID NO: 140426 - DNA, 20 bp, Artificial Sequence
  mmSKRIPTE0011205_NTC_746
  gRNA
taaaagtggtgcgtcgtcgt

SEQ ID NO: 140427 - DNA, 20 bp, Artificial Sequence
  mmSKRIPTE0011206_NTC_747
  gRNA
taaacgattcaccgataaca

SEQ ID NO: 140428 - DNA, 20 bp, Artificial Sequence
  mmSKRIPTE0011207_NTC_748
  gRNA
taacacgcactcacgtccgg

SEQ ID NO: 140429 - DNA, 20 bp, Artificial Sequence
  mmSKRIPTE0011208_NTC_749
  gRNA
taacagcttccgcgtaatat

SEQ ID NO: 140430 - DNA, 20 bp, Artificial Sequence
  mmSKRIPTE0011209_NTC_750
  gRNA
taacccttgatcaaccgata

SEQ ID NO: 140431 - DNA, 20 bp, Artificial Sequence
  mmSKRIPTE0011210_NTC_751
  gRNA
taacgttatgtcaaacgctc

SEQ ID NO: 140432 - DNA, 20 bp, Artificial Sequence
  mmSKRIPTE0011211_NTC_752
  gRNA
taactctaatgcgttccaag

SEQ ID NO: 140433 - DNA, 20 bp, Artificial Sequence
  mmSKRIPTE0011212_NTC_753
  gRNA
taagactgggtgtcccgcgt

SEQ ID NO: 140434 - DNA, 20 bp, Artificial Sequence
  mmSKRIPTE0011213_NTC_754
  gRNA
taagcggcgtcatgtcgccc

SEQ ID NO: 140435 - DNA, 20 bp, Artificial Sequence
  mmSKRIPTE0011214_NTC_755
  gRNA
taagtgacacttcgtatcgt

SEQ ID NO: 140436 - DNA, 20 bp, Artificial Sequence
  mmSKRIPTE0011215_NTC_756
  gRNA
taataaactatgtcccgccg

SEQ ID NO: 140437 - DNA, 20 bp, Artificial Sequence
  mmSKRIPTE0011216_NTC_757
  gRNA
taatgagtaacgctcatcgg

SEQ ID NO: 140438 - DNA, 20 bp, Artificial Sequence
  mmSKRIPTE0011217_NTC_758
  gRNA
taatgcgaatgcgacctctc

SEQ ID NO: 140439 - DNA, 20 bp, Artificial Sequence
  mmSKRIPTE0011218_NTC_759
  gRNA
taatggaagatgcgcgatac

SEQ ID NO: 140440 - DNA, 20 bp, Artificial Sequence
  mmSKRIPTE0011219_NTC_760
  gRNA
taatggcacttaccgggtct

SEQ ID NO: 140441 - DNA, 20 bp, Artificial Sequence
  mmSKRIPTE0011220_NTC_761
  gRNA
taattcgcaactcggatcat

SEQ ID NO: 140442 - DNA, 20 bp, Artificial Sequence
  mmSKRIPTE0011221_NTC_762
  gRNA
taattctttagtacgtgcaa

SEQ ID NO: 140443 - DNA, 20 bp, Artificial Sequence
  mmSKRIPTE0011222_NTC_763
  gRNA
tacacgccctaagctagtaa

SEQ ID NO: 140444 - DNA, 20 bp, Artificial Sequence
  mmSKRIPTE0011223_NTC_764
  gRNA
tacagttatacgtcgcggtg

SEQ ID NO: 140445 - DNA, 20 bp, Artificial Sequence
  mmSKRIPTE0011224_NTC_765
  gRNA
tacatcgaacaaccaaccga

SEQ ID NO: 140446 - DNA, 20 bp, Artificial Sequence
  mmSKRIPTE0011225_NTC_766
  gRNA
tacatgcggttgacacgttc

SEQ ID NO: 140447 - DNA, 20 bp, Artificial Sequence
  mmSKRIPTE0011226_NTC_767
  gRNA
tacccctctgcgatgccggt

SEQ ID NO: 140448 - DNA, 20 bp, Artificial Sequence
  mmSKRIPTE0011227_NTC_768
  gRNA
taccccttgaggggcgcata

SEQ ID NO: 140449 - DNA, 20 bp, Artificial Sequence
  mmSKRIPTE0011228_NTC_769
  gRNA
tacgacatcgcatggtaacg

SEQ ID NO: 140450 - DNA, 20 bp, Artificial Sequence
  mmSKRIPTE0011229_NTC_770
  gRNA
tacgacgaggacgcatcgag

SEQ ID NO: 140451 - DNA, 20 bp, Artificial Sequence
  mmSKRIPTE0011230_NTC_771
  gRNA
tacgctcacttctgcgaagg

SEQ ID NO: 140452 - DNA, 20 bp, Artificial Sequence
  mmSKRIPTE0011231_NTC_772
  gRNA
tacggacgtcgaattgagca

SEQ ID NO: 140453 - DNA, 20 bp, Artificial Sequence
  mmSKRIPTE0011232_NTC_773
  gRNA
tacgtctgcgcaaatagaat

SEQ ID NO: 140454 - DNA, 20 bp, Artificial Sequence
  mmSKRIPTE0011233_NTC_774
  gRNA
tactgcgtaccgcagtaagc

SEQ ID NO: 140455 - DNA, 20 bp, Artificial Sequence
  mmSKRIPTE0011234_NTC_775
  gRNA
tacttaccgaccgacaaacg

SEQ ID NO: 140456 - DNA, 20 bp, Artificial Sequence
  mmSKRIPTE0011235_NTC_776
  gRNA
tacttaggtccgcgtaaagc

SEQ ID NO: 140457 - DNA, 20 bp, Artificial Sequence
  mmSKRIPTE0011236_NTC_777
  gRNA
tagacgtccaccgactctga

SEQ ID NO: 140458 - DNA, 20 bp, Artificial Sequence
  mmSKRIPTE0011237_NTC_778
  gRNA
tagagcagatcccctcaacg

SEQ ID NO: 140459 - DNA, 20 bp, Artificial Sequence
  mmSKRIPTE0011238_NTC_779
  gRNA
tagatggtgcttctgtcgcg

SEQ ID NO: 140460 - DNA, 20 bp, Artificial Sequence
  mmSKRIPTE0011239_NTC_780
  gRNA
tagcccgtcgagtactcccc

SEQ ID NO: 140461 - DNA, 20 bp, Artificial Sequence
  mmSKRIPTE0011240_NTC_781
  gRNA
tagccgagttcacgccagta

SEQ ID NO: 140462 - DNA, 20 bp, Artificial Sequence
  mmSKRIPTE0011241_NTC_782
  gRNA
tagctgtttacgccgacctg

SEQ ID NO: 140463 - DNA, 20 bp, Artificial Sequence
  mmSKRIPTE0011242_NTC_783
  gRNA
taggccgctcaggccgcact

SEQ ID NO: 140464 - DNA, 20 bp, Artificial Sequence
  mmSKRIPTE0011243_NTC_784
  gRNA
taggcggacggttacatata

SEQ ID NO: 140465 - DNA, 20 bp, Artificial Sequence
  mmSKRIPTE0011244_NTC_785
  gRNA
taggggtgcgcattagacta

SEQ ID NO: 140466 - DNA, 20 bp, Artificial Sequence
  mmSKRIPTE0011245_NTC_786
  gRNA
taggtggcgcccaatcggac

SEQ ID NO: 140467 - DNA, 20 bp, Artificial Sequence
  mmSKRIPTE0011246_NTC_787
  gRNA
tagtaaaaaattcgccctcc

SEQ ID NO: 140468 - DNA, 20 bp, Artificial Sequence
  mmSKRIPTE0011247_NTC_788
  gRNA
tagtaggccggagcgcatcc

SEQ ID NO: 140469 - DNA, 20 bp, Artificial Sequence
  mmSKRIPTE0011248_NTC_789
  gRNA
tagtaggttgatcgcgtcgc

SEQ ID NO: 140470 - DNA, 20 bp, Artificial Sequence
  mmSKRIPTE0011249_NTC_790
  gRNA
tagtcagtcggcctccgtgc

SEQ ID NO: 140471 - DNA, 20 bp, Artificial Sequence
  mmSKRIPTE0011250_NTC_791
  gRNA
tagtcctagttagattcgcg

SEQ ID NO: 140472 - DNA, 20 bp, Artificial Sequence
  mmSKRIPTE0011251_NTC_792
  gRNA
tagtgcgaacagtcacggcg

SEQ ID NO: 140473 - DNA, 20 bp, Artificial Sequence
  mmSKRIPTE0011252_NTC_793
  gRNA
tagtgttgtgagcgtcgtac

SEQ ID NO: 140474 - DNA, 20 bp, Artificial Sequence
  mmSKRIPTE0011253_NTC_794
  gRNA
tagttaaccgtaaagtgggc

SEQ ID NO: 140475 - DNA, 20 bp, Artificial Sequence
  mmSKRIPTE0011254_NTC_795
  gRNA
tagttatctgcaacgcatag

SEQ ID NO: 140476 - DNA, 20 bp, Artificial Sequence
  mmSKRIPTE0011255_NTC_796
  gRNA
tatactcgcctgtcacagcg

SEQ ID NO: 140477 - DNA, 20 bp, Artificial Sequence
  mmSKRIPTE0011256_NTC_797
  gRNA
tatcccgatccggaaactag

SEQ ID NO: 140478 - DNA, 20 bp, Artificial Sequence
  mmSKRIPTE0011257_NTC_798
  gRNA
tatcgaactgcacacgcaac

SEQ ID NO: 140479 - DNA, 20 bp, Artificial Sequence
  mmSKRIPTE0011258_NTC_799
  gRNA
tatctaatcgcggagtcgta

SEQ ID NO: 140480 - DNA, 20 bp, Artificial Sequence
  mmSKRIPTE0011259_NTC_800
  gRNA
tatctctggatgccgtcggt

SEQ ID NO: 140481 - DNA, 20 bp, Artificial Sequence
  mmSKRIPTE0011260_NTC_801
  gRNA
tatgaaacatctcggcgacg

SEQ ID NO: 140482 - DNA, 20 bp, Artificial Sequence
  mmSKRIPTE0011261_NTC_802
  gRNA
tatgaacctccggatcggtg

SEQ ID NO: 140483 - DNA, 20 bp, Artificial Sequence
  mmSKRIPTE0011262_NTC_803
  gRNA
tatgaactaggcgtaaacgg

SEQ ID NO: 140484 - DNA, 20 bp, Artificial Sequence
  mmSKRIPTE0011263_NTC_804
  gRNA
tatgacacacaatctgcgac

SEQ ID NO: 140485 - DNA, 20 bp, Artificial Sequence
  mmSKRIPTE0011264_NTC_805
  gRNA
tatgactgcacgactcgcta

SEQ ID NO: 140486 - DNA, 20 bp, Artificial Sequence
  mmSKRIPTE0011265_NTC_806
  gRNA
tatgatcgtatggcccttcc

SEQ ID NO: 140487 - DNA, 20 bp, Artificial Sequence
  mmSKRIPTE0011266_NTC_807
  gRNA
tatgccatatgcccgttttt

SEQ ID NO: 140488 - DNA, 20 bp, Artificial Sequence
  mmSKRIPTE0011267_NTC_808
  gRNA
tcaaacgcccgggcgcccca

SEQ ID NO: 140489 - DNA, 20 bp, Artificial Sequence
  mmSKRIPTE0011268_NTC_809
  gRNA
tcaactatgaaccgccgtgc

SEQ ID NO: 140490 - DNA, 20 bp, Artificial Sequence
  mmSKRIPTE0011269_NTC_810
  gRNA
tcaacttaacctcgagtccg

SEQ ID NO: 140491 - DNA, 20 bp, Artificial Sequence
  mmSKRIPTE0011270_NTC_811
  gRNA
tcaatagttctgcgcgaatt

SEQ ID NO: 140492 - DNA, 20 bp, Artificial Sequence
  mmSKRIPTE0011271_NTC_812
  gRNA
tcaatctgcggtgactcgtt

SEQ ID NO: 140493 - DNA, 20 bp, Artificial Sequence
  mmSKRIPTE0011272_NTC_813
  gRNA
tcaattagtggccgccaagc

SEQ ID NO: 140494 - DNA, 20 bp, Artificial Sequence
  mmSKRIPTE0011273_NTC_814
  gRNA
tcacaacccccgactatcgc

SEQ ID NO: 140495 - DNA, 20 bp, Artificial Sequence
  mmSKRIPTE0011274_NTC_815
  gRNA
tcacacgggatctcgccggt

SEQ ID NO: 140496 - DNA, 20 bp, Artificial Sequence
  mmSKRIPTE0011275_NTC_816
  gRNA
tcacatgacactcgttacga

SEQ ID NO: 140497 - DNA, 20 bp, Artificial Sequence
  mmSKRIPTE0011276_NTC_817
  gRNA
tcacccgcgtatacgacctg

SEQ ID NO: 140498 - DNA, 20 bp, Artificial Sequence
  mmSKRIPTE0011277_NTC_818
  gRNA
tcacgcacgactaagggaat

SEQ ID NO: 140499 - DNA, 20 bp, Artificial Sequence
  mmSKRIPTE0011278_NTC_819
  gRNA
tcactcaaagtgcgtagtcg

SEQ ID NO: 140500 - DNA, 20 bp, Artificial Sequence
  mmSKRIPTE0011279_NTC_820
  gRNA
tcacttcgggcattacgagc

SEQ ID NO: 140501 - DNA, 20 bp, Artificial Sequence
  mmSKRIPTE0011280_NTC_821
  gRNA
tcactttaagcaccccgcgc

SEQ ID NO: 140502 - DNA, 20 bp, Artificial Sequence
  mmSKRIPTE0011281_NTC_822
  gRNA
tcagcagaattgggcccgta

SEQ ID NO: 140503 - DNA, 20 bp, Artificial Sequence
  mmSKRIPTE0011282_NTC_823
  gRNA
tcagctacgatcggacccaa

SEQ ID NO: 140504 - DNA, 20 bp, Artificial Sequence
  mmSKRIPTE0011283_NTC_824
  gRNA
tcagtcagtcggccccctgc

SEQ ID NO: 140505 - DNA, 20 bp, Artificial Sequence
  mmSKRIPTE0011284_NTC_825
  gRNA
tcatattagacaatctccgc

SEQ ID NO: 140506 - DNA, 20 bp, Artificial Sequence
  mmSKRIPTE0011285_NTC_826
  gRNA
tcatctacggtatcgaaagg

SEQ ID NO: 140507 - DNA, 20 bp, Artificial Sequence
  mmSKRIPTE0011286_NTC_827
  gRNA
tcatgcgcctcgtaatacct

SEQ ID NO: 140508 - DNA, 20 bp, Artificial Sequence
  mmSKRIPTE0011287_NTC_828
  gRNA
tcatgttgcgtcgtccgtta

SEQ ID NO: 140509 - DNA, 20 bp, Artificial Sequence
  mmSKRIPTE0011288_NTC_829
  gRNA
tcccccgtacgtgtatgtcg

SEQ ID NO: 140510 - DNA, 20 bp, Artificial Sequence
  mmSKRIPTE0011289_NTC_830
  gRNA
tccccttcgtcggcgccagg

SEQ ID NO: 140511 - DNA, 20 bp, Artificial Sequence
  mmSKRIPTE0011290_NTC_831
  gRNA
tcccgggaggtacggtgtac

SEQ ID NO: 140512 - DNA, 20 bp, Artificial Sequence
  mmSKRIPTE0011291_NTC_832
  gRNA
tccgaacaggcgcgtttctc

SEQ ID NO: 140513 - DNA, 20 bp, Artificial Sequence
  mmSKRIPTE0011292_NTC_833
  gRNA
tccgcggcaacgtttgggtc

SEQ ID NO: 140514 - DNA, 20 bp, Artificial Sequence
  mmSKRIPTE0011293_NTC_834
  gRNA
tccgtacatcgacctattac

SEQ ID NO: 140515 - DNA, 20 bp, Artificial Sequence
  mmSKRIPTE0011294_NTC_835
  gRNA
tccgtaggacgtatatattc

SEQ ID NO: 140516 - DNA, 20 bp, Artificial Sequence
  mmSKRIPTE0011295_NTC_836
  gRNA
tcctacaccaccccggccgt

SEQ ID NO: 140517 - DNA, 20 bp, Artificial Sequence
  mmSKRIPTE0011296_NTC_837
  gRNA
tcctaggcctgatttacccg

SEQ ID NO: 140518 - DNA, 20 bp, Artificial Sequence
  mmSKRIPTE0011297_NTC_838
  gRNA
tcctataattgagcgaacgg

SEQ ID NO: 140519 - DNA, 20 bp, Artificial Sequence
  mmSKRIPTE0011298_NTC_839
  gRNA
tcctccgatcgaccagggta

SEQ ID NO: 140520 - DNA, 20 bp, Artificial Sequence
  mmSKRIPTE0011299_NTC_840
  gRNA
tcctgcgcgatgaccgtcgg

SEQ ID NO: 140521 - DNA, 20 bp, Artificial Sequence
  mmSKRIPTE0011300_NTC_841
  gRNA
tcctgcgttccactcgtact

SEQ ID NO: 140522 - DNA, 20 bp, Artificial Sequence
  mmSKRIPTE0011301_NTC_842
  gRNA
tcgagtcttgactcaacgct

SEQ ID NO: 140523 - DNA, 20 bp, Artificial Sequence
  mmSKRIPTE0011302_NTC_843
  gRNA
tcgatcgtcggcggagcgga

SEQ ID NO: 140524 - DNA, 20 bp, Artificial Sequence
  mmSKRIPTE0011303_NTC_844
  gRNA
tcgcaaaatgcggattccgt

SEQ ID NO: 140525 - DNA, 20 bp, Artificial Sequence
  mmSKRIPTE0011304_NTC_845
  gRNA
tcgcactctaggccgttatt

SEQ ID NO: 140526 - DNA, 20 bp, Artificial Sequence
  mmSKRIPTE0011305_NTC_846
  gRNA
tcgcgaattgctgccgaact

SEQ ID NO: 140527 - DNA, 20 bp, Artificial Sequence
  mmSKRIPTE0011306_NTC_847
  gRNA
tcgctaagccgggtaatact

SEQ ID NO: 140528 - DNA, 20 bp, Artificial Sequence
  mmSKRIPTE0011307_NTC_848
  gRNA
tcgctcattaggagcgctat

SEQ ID NO: 140529 - DNA, 20 bp, Artificial Sequence
  mmSKRIPTE0011308_NTC_849
  gRNA
tcgctccgctagtagtgggt

SEQ ID NO: 140530 - DNA, 20 bp, Artificial Sequence
  mmSKRIPTE0011309_NTC_850
  gRNA
tcgctgagcaacgaagcaac

SEQ ID NO: 140531 - DNA, 20 bp, Artificial Sequence
  mmSKRIPTE0011310_NTC_851
  gRNA
tcgcttctgattgatccacg

SEQ ID NO: 140532 - DNA, 20 bp, Artificial Sequence
  mmSKRIPTE0011311_NTC_852
  gRNA
tcggaattccgcaggccgag

SEQ ID NO: 140533 - DNA, 20 bp, Artificial Sequence
  mmSKRIPTE0011312_NTC_853
  gRNA
tcggactatagcgtgaacgt

SEQ ID NO: 140534 - DNA, 20 bp, Artificial Sequence
  mmSKRIPTE0011313_NTC_854
  gRNA
tcggatcggtacataaagtt

SEQ ID NO: 140535 - DNA, 20 bp, Artificial Sequence
  mmSKRIPTE0011314_NTC_855
  gRNA
tcggattttaatccttacgc

SEQ ID NO: 140536 - DNA, 20 bp, Artificial Sequence
  mmSKRIPTE0011315_NTC_856
  gRNA
tcggcgcagcctaatgtata

SEQ ID NO: 140537 - DNA, 20 bp, Artificial Sequence
  mmSKRIPTE0011316_NTC_857
  gRNA
tcgtaaagtcgcagcgacgt

SEQ ID NO: 140538 - DNA, 20 bp, Artificial Sequence
  mmSKRIPTE0011317_NTC_858
  gRNA
tcgtaagttcgctatatgcc

SEQ ID NO: 140539 - DNA, 20 bp, Artificial Sequence
  mmSKRIPTE0011318_NTC_859
  gRNA
tcgtaccgcacgtgtaagcc

SEQ ID NO: 140540 - DNA, 20 bp, Artificial Sequence
  mmSKRIPTE0011319_NTC_860
  gRNA
tcgtgccggaataaccacta

SEQ ID NO: 140541 - DNA, 20 bp, Artificial Sequence
  mmSKRIPTE0011320_NTC_861
  gRNA
tcgtgcctagctcggttgag

SEQ ID NO: 140542 - DNA, 20 bp, Artificial Sequence
  mmSKRIPTE0011321_NTC_862
  gRNA
tcgtgtctagctatcgagtg

SEQ ID NO: 140543 - DNA, 20 bp, Artificial Sequence
  mmSKRIPTE0011322_NTC_863
  gRNA
tcgttacataccccgcggaa

SEQ ID NO: 140544 - DNA, 20 bp, Artificial Sequence
  mmSKRIPTE0011323_NTC_864
  gRNA
tcgttgtgtcgacatccgca

SEQ ID NO: 140545 - DNA, 20 bp, Artificial Sequence
  mmSKRIPTE0011324_NTC_865
  gRNA
tctacacgcgcgttcaaccg

SEQ ID NO: 140546 - DNA, 20 bp, Artificial Sequence
  mmSKRIPTE0011325_NTC_866
  gRNA
tctaggatactcttaacggg

SEQ ID NO: 140547 - DNA, 20 bp, Artificial Sequence
  mmSKRIPTE0011326_NTC_867
  gRNA
tctatatctagtctcggcgc

SEQ ID NO: 140548 - DNA, 20 bp, Artificial Sequence
  mmSKRIPTE0011327_NTC_868
  gRNA
tctcagttcgtagcgaacga

SEQ ID NO: 140549 - DNA, 20 bp, Artificial Sequence
  mmSKRIPTE0011328_NTC_869
  gRNA
tctccgggccgtgttagacc

SEQ ID NO: 140550 - DNA, 20 bp, Artificial Sequence
  mmSKRIPTE0011329_NTC_870
  gRNA
tctccgtccgaaacggcgac

SEQ ID NO: 140551 - DNA, 20 bp, Artificial Sequence
  mmSKRIPTE0011330_NTC_871
  gRNA
tctcgaataaattttctcgc

SEQ ID NO: 140552 - DNA, 20 bp, Artificial Sequence
  mmSKRIPTE0011331_NTC_872
  gRNA
tctcttcgcgcccgctttgc

SEQ ID NO: 140553 - DNA, 20 bp, Artificial Sequence
  mmSKRIPTE0011332_NTC_873
  gRNA
tctgcaccgcgacttagctt

SEQ ID NO: 140554 - DNA, 20 bp, Artificial Sequence
  mmSKRIPTE0011333_NTC_874
  gRNA
tctggacgcgagatgacggg

SEQ ID NO: 140555 - DNA, 20 bp, Artificial Sequence
  mmSKRIPTE0011334_NTC_875
  gRNA
tcttctagtgcgagttccgc

SEQ ID NO: 140556 - DNA, 20 bp, Artificial Sequence
  mmSKRIPTE0011335_NTC_876
  gRNA
tcttctcgagcgtgcgggcc

SEQ ID NO: 140557 - DNA, 20 bp, Artificial Sequence
  mmSKRIPTE0011336_NTC_877
  gRNA
tcttgactccgacttcgggc

SEQ ID NO: 140558 - DNA, 20 bp, Artificial Sequence
  mmSKRIPTE0011337_NTC_878
  gRNA
tgacaaccgcggtacctcta

SEQ ID NO: 140559 - DNA, 20 bp, Artificial Sequence
  mmSKRIPTE0011338_NTC_879
  gRNA
tgacccgtctcttcgcgcac

SEQ ID NO: 140560 - DNA, 20 bp, Artificial Sequence
  mmSKRIPTE0011339_NTC_880
  gRNA
tgaccctcttaatctccggt

SEQ ID NO: 140561 - DNA, 20 bp, Artificial Sequence
  mmSKRIPTE0011340_NTC_881
  gRNA
tgacgcgcctcggaccaacc

SEQ ID NO: 140562 - DNA, 20 bp, Artificial Sequence
  mmSKRIPTE0011341_NTC_882
  gRNA
tgacgctaaggcccgctaac

SEQ ID NO: 140563 - DNA, 20 bp, Artificial Sequence
  mmSKRIPTE0011342_NTC_883
  gRNA
tgacttgacacgttcgatat

SEQ ID NO: 140564 - DNA, 20 bp, Artificial Sequence
  mmSKRIPTE0011343_NTC_884
  gRNA
tgagaccaatgccgcggaat

SEQ ID NO: 140565 - DNA, 20 bp, Artificial Sequence
  mmSKRIPTE0011344_NTC_885
  gRNA
tgagagcaaggcgcatacgc

SEQ ID NO: 140566 - DNA, 20 bp, Artificial Sequence
  mmSKRIPTE0011345_NTC_886
  gRNA
tgagccggtgcgctctcggt

SEQ ID NO: 140567 - DNA, 20 bp, Artificial Sequence
  mmSKRIPTE0011346_NTC_887
  gRNA
tgagcctttgtggaccgcgg

SEQ ID NO: 140568 - DNA, 20 bp, Artificial Sequence
  mmSKRIPTE0011347_NTC_888
  gRNA
tgagcgctttcccgatccgg

SEQ ID NO: 140569 - DNA, 20 bp, Artificial Sequence
  mmSKRIPTE0011348_NTC_889
  gRNA
tgagggctcaatacttccgc

SEQ ID NO: 140570 - DNA, 20 bp, Artificial Sequence
  mmSKRIPTE0011349_NTC_890
  gRNA
tgaggttaccgccggctttt

SEQ ID NO: 140571 - DNA, 20 bp, Artificial Sequence
  mmSKRIPTE0011350_NTC_891
  gRNA
tgataaacgatgcgaactcg

SEQ ID NO: 140572 - DNA, 20 bp, Artificial Sequence
  mmSKRIPTE0011351_NTC_892
  gRNA
tgatcaacgtcggtggacgg

SEQ ID NO: 140573 - DNA, 20 bp, Artificial Sequence
  mmSKRIPTE0011352_NTC_893
  gRNA
tgatccccgtcccgaagtta

SEQ ID NO: 140574 - DNA, 20 bp, Artificial Sequence
  mmSKRIPTE0011353_NTC_894
  gRNA
tgatgccggtacccgtaact

SEQ ID NO: 140575 - DNA, 20 bp, Artificial Sequence
  mmSKRIPTE0011354_NTC_895
  gRNA
tgatggacgcgatacgttta

SEQ ID NO: 140576 - DNA, 20 bp, Artificial Sequence
  mmSKRIPTE0011355_NTC_896
  gRNA
tgattgggggtcgttcgcca

SEQ ID NO: 140577 - DNA, 20 bp, Artificial Sequence
  mmSKRIPTE0011356_NTC_897
  gRNA
tgcaacgatggttacggtac

SEQ ID NO: 140578 - DNA, 20 bp, Artificial Sequence
  mmSKRIPTE0011357_NTC_898
  gRNA
tgcaccggtacgggcgactc

SEQ ID NO: 140579 - DNA, 20 bp, Artificial Sequence
  mmSKRIPTE0011358_NTC_899
  gRNA
tgcagatcgcgaagcgacta

SEQ ID NO: 140580 - DNA, 20 bp, Artificial Sequence
  mmSKRIPTE0011359_NTC_900
  gRNA
tgcagtagtcgcggataggc

SEQ ID NO: 140581 - DNA, 20 bp, Artificial Sequence
  mmSKRIPTE0011360_NTC_901
  gRNA
tgccctgcgtccgctacgtc

SEQ ID NO: 140582 - DNA, 20 bp, Artificial Sequence
  mmSKRIPTE0011361_NTC_902
  gRNA
tgccgacgcgacgcagcgta

SEQ ID NO: 140583 - DNA, 20 bp, Artificial Sequence
  mmSKRIPTE0011362_NTC_903
  gRNA
tgcctactgtcgttcccgcg

SEQ ID NO: 140584 - DNA, 20 bp, Artificial Sequence
  mmSKRIPTE0011363_NTC_904
  gRNA
tgccttcagtcgaccgttac

SEQ ID NO: 140585 - DNA, 20 bp, Artificial Sequence
  mmSKRIPTE0011364_NTC_905
  gRNA
tgcgcgtcctgttatgaccg

SEQ ID NO: 140586 - DNA, 20 bp, Artificial Sequence
  mmSKRIPTE0011365_NTC_906
  gRNA
tgcggcaatgttaaccctta

SEQ ID NO: 140587 - DNA, 20 bp, Artificial Sequence
  mmSKRIPTE0011366_NTC_907
  gRNA
tgcgtaaaacttgcgctcga

SEQ ID NO: 140588 - DNA, 20 bp, Artificial Sequence
  mmSKRIPTE0011367_NTC_908
  gRNA
tgcgtctcagcttcggctat

SEQ ID NO: 140589 - DNA, 20 bp, Artificial Sequence
  mmSKRIPTE0011368_NTC_909
  gRNA
tgctggccgatacgtgcttg

SEQ ID NO: 140590 - DNA, 20 bp, Artificial Sequence
  mmSKRIPTE0011369_NTC_910
  gRNA
tgcttagggcccttcggcgg

SEQ ID NO: 140591 - DNA, 20 bp, Artificial Sequence
  mmSKRIPTE0011370_NTC_911
  gRNA
tgctttaccgcgttgggtaa

SEQ ID NO: 140592 - DNA, 20 bp, Artificial Sequence
  mmSKRIPTE0011371_NTC_912
  gRNA
tggatccgcttcgcacggcg

SEQ ID NO: 140593 - DNA, 20 bp, Artificial Sequence
  mmSKRIPTE0011372_NTC_913
  gRNA
tggcacggagttgcatacgc

SEQ ID NO: 140594 - DNA, 20 bp, Artificial Sequence
  mmSKRIPTE0011373_NTC_914
  gRNA
tggcccacaaggtgcgatat

SEQ ID NO: 140595 - DNA, 20 bp, Artificial Sequence
  mmSKRIPTE0011374_NTC_915
  gRNA
tggcgctcctgcgcacacga

SEQ ID NO: 140596 - DNA, 20 bp, Artificial Sequence
  mmSKRIPTE0011375_NTC_916
  gRNA
tggcttaatggacagcgcga

SEQ ID NO: 140597 - DNA, 20 bp, Artificial Sequence
  mmSKRIPTE0011376_NTC_917
  gRNA
tgggccatagtggcgcgtga

SEQ ID NO: 140598 - DNA, 20 bp, Artificial Sequence
  mmSKRIPTE0011377_NTC_918
  gRNA
tgggcggttcaaagcgaatt

SEQ ID NO: 140599 - DNA, 20 bp, Artificial Sequence
  mmSKRIPTE0011378_NTC_919
  gRNA
tgggtcctaaacgcggttca

SEQ ID NO: 140600 - DNA, 20 bp, Artificial Sequence
  mmSKRIPTE0011379_NTC_920
  gRNA
tgggttccggccccatgtac

SEQ ID NO: 140601 - DNA, 20 bp, Artificial Sequence
  mmSKRIPTE0011380_NTC_921
  gRNA
tggtaccactcgccgaatct

SEQ ID NO: 140602 - DNA, 20 bp, Artificial Sequence
  mmSKRIPTE0011381_NTC_922
  gRNA
tggttcaccactcgagatcg

SEQ ID NO: 140603 - DNA, 20 bp, Artificial Sequence
  mmSKRIPTE0011382_NTC_923
  gRNA
tggttcgaccaacatggttc

SEQ ID NO: 140604 - DNA, 20 bp, Artificial Sequence
  mmSKRIPTE0011383_NTC_924
  gRNA
tggttggcatgtcgccagcg

SEQ ID NO: 140605 - DNA, 20 bp, Artificial Sequence
  mmSKRIPTE0011384_NTC_925
  gRNA
tgtaacgatctgggcggtct

SEQ ID NO: 140606 - DNA, 20 bp, Artificial Sequence
  mmSKRIPTE0011385_NTC_926
  gRNA
tgtactcgcatagcgggggc

SEQ ID NO: 140607 - DNA, 20 bp, Artificial Sequence
  mmSKRIPTE0011386_NTC_927
  gRNA
tgtatagtcatcgccgtaat

SEQ ID NO: 140608 - DNA, 20 bp, Artificial Sequence
  mmSKRIPTE0011387_NTC_928
  gRNA
tgtatccaccgtgacccggt

SEQ ID NO: 140609 - DNA, 20 bp, Artificial Sequence
  mmSKRIPTE0011388_NTC_929
  gRNA
tgtcccgacgatgtgtaaat

SEQ ID NO: 140610 - DNA, 20 bp, Artificial Sequence
  mmSKRIPTE0011389_NTC_930
  gRNA
tgtcctaccgaatgaaccgt

SEQ ID NO: 140611 - DNA, 20 bp, Artificial Sequence
  mmSKRIPTE0011390_NTC_931
  gRNA
tgtcgccgatggtcagtcgc

SEQ ID NO: 140612 - DNA, 20 bp, Artificial Sequence
  mmSKRIPTE0011391_NTC_932
  gRNA
tgtcggacccattgtcgaac

SEQ ID NO: 140613 - DNA, 20 bp, Artificial Sequence
  mmSKRIPTE0011392_NTC_933
  gRNA
tgtctatgtttggccacgca

SEQ ID NO: 140614 - DNA, 20 bp, Artificial Sequence
  mmSKRIPTE0011393_NTC_934
  gRNA
tgtctgccgcatacgctata

SEQ ID NO: 140615 - DNA, 20 bp, Artificial Sequence
  mmSKRIPTE0011394_NTC_935
  gRNA
tgtgccacgccgctgcaacg

SEQ ID NO: 140616 - DNA, 20 bp, Artificial Sequence
  mmSKRIPTE0011395_NTC_936
  gRNA
tgtgcctacgccattcggct

SEQ ID NO: 140617 - DNA, 20 bp, Artificial Sequence
  mmSKRIPTE0011396_NTC_937
  gRNA
tgtgtaattacgtttcgcgg

SEQ ID NO: 140618 - DNA, 20 bp, Artificial Sequence
  mmSKRIPTE0011397_NTC_938
  gRNA
tgttaatgccaacgggacat

SEQ ID NO: 140619 - DNA, 20 bp, Artificial Sequence
  mmSKRIPTE0011398_NTC_939
  gRNA
tgttcgccctctcacgattg

SEQ ID NO: 140620 - DNA, 20 bp, Artificial Sequence
  mmSKRIPTE0011399_NTC_940
  gRNA
tgtttatgcggaacttccgc

SEQ ID NO: 140621 - DNA, 20 bp, Artificial Sequence
  mmSKRIPTE0011400_NTC_941
  gRNA
ttaacgtctgtgcgcactac

SEQ ID NO: 140622 - DNA, 20 bp, Artificial Sequence
  mmSKRIPTE0011401_NTC_942
  gRNA
ttaactggggggaccggacg

SEQ ID NO: 140623 - DNA, 20 bp, Artificial Sequence
  mmSKRIPTE0011402_NTC_943
  gRNA
ttacagttcataccgtcgcc

SEQ ID NO: 140624 - DNA, 20 bp, Artificial Sequence
  mmSKRIPTE0011403_NTC_944
  gRNA
ttaccgtggtacgtcaggtt

SEQ ID NO: 140625 - DNA, 20 bp, Artificial Sequence
  mmSKRIPTE0011404_NTC_945
  gRNA
ttacgcaaagctgcgatgag

SEQ ID NO: 140626 - DNA, 20 bp, Artificial Sequence
  mmSKRIPTE0011405_NTC_946
  gRNA
ttactgatcagtcggacgca

SEQ ID NO: 140627 - DNA, 20 bp, Artificial Sequence
  mmSKRIPTE0011406_NTC_947
  gRNA
ttacttggtgcaacaaccgg

SEQ ID NO: 140628 - DNA, 20 bp, Artificial Sequence
  mmSKRIPTE0011407_NTC_948
  gRNA
ttagccttgccccgtcatac

SEQ ID NO: 140629 - DNA, 20 bp, Artificial Sequence
  mmSKRIPTE0011408_NTC_949
  gRNA
ttaggacgtgcttccgaggg

SEQ ID NO: 140630 - DNA, 20 bp, Artificial Sequence
  mmSKRIPTE0011409_NTC_950
  gRNA
ttagttcgaccactcctgat

SEQ ID NO: 140631 - DNA, 20 bp, Artificial Sequence
  mmSKRIPTE0011410_NTC_951
  gRNA
ttataccgtcacgagtgccc

SEQ ID NO: 140632 - DNA, 20 bp, Artificial Sequence
  mmSKRIPTE0011411_NTC_952
  gRNA
ttatcgcacaaccccgaaag

SEQ ID NO: 140633 - DNA, 20 bp, Artificial Sequence
  mmSKRIPTE0011412_NTC_953
  gRNA
ttatcgtactagtacgtaca

SEQ ID NO: 140634 - DNA, 20 bp, Artificial Sequence
  mmSKRIPTE0011413_NTC_954
  gRNA
ttatgacctcgatgcgacat

SEQ ID NO: 140635 - DNA, 20 bp, Artificial Sequence
  mmSKRIPTE0011414_NTC_955
  gRNA
ttatgtgcctctcggcgcat

SEQ ID NO: 140636 - DNA, 20 bp, Artificial Sequence
  mmSKRIPTE0011415_NTC_956
  gRNA
ttattggtttcaacggttgt

SEQ ID NO: 140637 - DNA, 20 bp, Artificial Sequence
  mmSKRIPTE0011416_NTC_957
  gRNA
ttatttacgcgctgaacttg

SEQ ID NO: 140638 - DNA, 20 bp, Artificial Sequence
  mmSKRIPTE0011417_NTC_958
  gRNA
ttcaacgacggaagacgcgc

SEQ ID NO: 140639 - DNA, 20 bp, Artificial Sequence
  mmSKRIPTE0011418_NTC_959
  gRNA
ttcaagtgttatggacgcgc

SEQ ID NO: 140640 - DNA, 20 bp, Artificial Sequence
  mmSKRIPTE0011419_NTC_960
  gRNA
ttcaattgttcgcccgaaca

SEQ ID NO: 140641 - DNA, 20 bp, Artificial Sequence
  mmSKRIPTE0011420_NTC_961
  gRNA
ttcatccttcgtagcgcagc

SEQ ID NO: 140642 - DNA, 20 bp, Artificial Sequence
  mmSKRIPTE0011421_NTC_962
  gRNA
ttcatcgcagatcgatttcg

SEQ ID NO: 140643 - DNA, 20 bp, Artificial Sequence
  mmSKRIPTE0011422_NTC_963
  gRNA
ttccagtataccgaattcgc

SEQ ID NO: 140644 - DNA, 20 bp, Artificial Sequence
  mmSKRIPTE0011423_NTC_964
  gRNA
ttccccgcccgtgcggtcat

SEQ ID NO: 140645 - DNA, 20 bp, Artificial Sequence
  mmSKRIPTE0011424_NTC_965
  gRNA
ttcgaagtctaacccgcggg

SEQ ID NO: 140646 - DNA, 20 bp, Artificial Sequence
  mmSKRIPTE0011425_NTC_966
  gRNA
ttcgacgtgcggcgtattgg

SEQ ID NO: 140647 - DNA, 20 bp, Artificial Sequence
  mmSKRIPTE0011426_NTC_967
  gRNA
ttcgactgcgcacgccatga

SEQ ID NO: 140648 - DNA, 20 bp, Artificial Sequence
  mmSKRIPTE0011427_NTC_968
  gRNA
ttcgagacggatacgtctgc

SEQ ID NO: 140649 - DNA, 20 bp, Artificial Sequence
  mmSKRIPTE0011428_NTC_969
  gRNA
ttcgagattttaatagcgca

SEQ ID NO: 140650 - DNA, 20 bp, Artificial Sequence
  mmSKRIPTE0011429_NTC_970
  gRNA
ttcgatataggggacggcgg

SEQ ID NO: 140651 - DNA, 20 bp, Artificial Sequence
  mmSKRIPTE0011430_NTC_971
  gRNA
ttcgccggcgacgaagtgca

SEQ ID NO: 140652 - DNA, 20 bp, Artificial Sequence
  mmSKRIPTE0011431_NTC_972
  gRNA
ttcgcgagtaaggtaggcat

SEQ ID NO: 140653 - DNA, 20 bp, Artificial Sequence
  mmSKRIPTE0011432_NTC_973
  gRNA
ttcggctcaatggcgcgagc

SEQ ID NO: 140654 - DNA, 20 bp, Artificial Sequence
  mmSKRIPTE0011433_NTC_974
  gRNA
ttcggctggtgtgcgttcac

SEQ ID NO: 140655 - DNA, 20 bp, Artificial Sequence
  mmSKRIPTE0011434_NTC_975
  gRNA
ttcgtggccgaaggcgccgc

SEQ ID NO: 140656 - DNA, 20 bp, Artificial Sequence
  mmSKRIPTE0011435_NTC_976
  gRNA
ttctccataccgtaactccg

SEQ ID NO: 140657 - DNA, 20 bp, Artificial Sequence
  mmSKRIPTE0011436_NTC_977
  gRNA
ttctgattagatacgtacga

SEQ ID NO: 140658 - DNA, 20 bp, Artificial Sequence
  mmSKRIPTE0011437_NTC_978
  gRNA
ttgaacacgacacccgtgcc

SEQ ID NO: 140659 - DNA, 20 bp, Artificial Sequence
  mmSKRIPTE0011438_NTC_979
  gRNA
ttgaagtagggtcggattga

SEQ ID NO: 140660 - DNA, 20 bp, Artificial Sequence
  mmSKRIPTE0011439_NTC_980
  gRNA
ttgaatccgaggcgccgatg

SEQ ID NO: 140661 - DNA, 20 bp, Artificial Sequence
  mmSKRIPTE0011440_NTC_981
  gRNA
ttgagcggacccccctacaa

SEQ ID NO: 140662 - DNA, 20 bp, Artificial Sequence
  mmSKRIPTE0011441_NTC_982
  gRNA
ttgataaaccgcggccgaaa

SEQ ID NO: 140663 - DNA, 20 bp, Artificial Sequence
  mmSKRIPTE0011442_NTC_983
  gRNA
ttgcacccccagttcgttgc

SEQ ID NO: 140664 - DNA, 20 bp, Artificial Sequence
  mmSKRIPTE0011443_NTC_984
  gRNA
ttgcagcaacggcgacggct

SEQ ID NO: 140665 - DNA, 20 bp, Artificial Sequence
  mmSKRIPTE0011444_NTC_985
  gRNA
ttgcgtgtgcgttgttaacg

SEQ ID NO: 140666 - DNA, 20 bp, Artificial Sequence
  mmSKRIPTE0011445_NTC_986
  gRNA
ttggacgtacactttcgttc

SEQ ID NO: 140667 - DNA, 20 bp, Artificial Sequence
  mmSKRIPTE0011446_NTC_987
  gRNA
ttggcggctcgctcctgcgt

SEQ ID NO: 140668 - DNA, 20 bp, Artificial Sequence
  mmSKRIPTE0011447_NTC_988
  gRNA
ttgtcaacttcggccaacgc

SEQ ID NO: 140669 - DNA, 20 bp, Artificial Sequence
  mmSKRIPTE0011448_NTC_989
  gRNA
ttgtcgctaactcagaatag

SEQ ID NO: 140670 - DNA, 20 bp, Artificial Sequence
  mmSKRIPTE0011449_NTC_990
  gRNA
ttgtttcagccttgagcgcg

SEQ ID NO: 140671 - DNA, 20 bp, Artificial Sequence
  mmSKRIPTE0011450_NTC_991
  gRNA
tttacgtatgctgtgcgcga

SEQ ID NO: 140672 - DNA, 20 bp, Artificial Sequence
  mmSKRIPTE0011451_NTC_992
  gRNA
tttagtcagacgagccggat

SEQ ID NO: 140673 - DNA, 20 bp, Artificial Sequence
  mmSKRIPTE0011452_NTC_993
  gRNA
tttcagttgtcgcgcgactc

SEQ ID NO: 140674 - DNA, 20 bp, Artificial Sequence
  mmSKRIPTE0011453_NTC_994
  gRNA
tttctaattacccgatacgt

SEQ ID NO: 140675 - DNA, 20 bp, Artificial Sequence
  mmSKRIPTE0011454_NTC_995
  gRNA
tttctagggccgccgcccgc

SEQ ID NO: 140676 - DNA, 20 bp, Artificial Sequence
  mmSKRIPTE0011455_NTC_996
  gRNA
tttgacattttcgtctcgcg

SEQ ID NO: 140677 - DNA, 20 bp, Artificial Sequence
  mmSKRIPTE0011456_NTC_997
  gRNA
ttttagtaggtcaacgctgt

SEQ ID NO: 140678 - DNA, 20 bp, Artificial Sequence
  mmSKRIPTE0011457_NTC_998
  gRNA
ttttcgtcgactaagtcaag

SEQ ID NO: 140679 - DNA, 20 bp, Artificial Sequence
  mmSKRIPTE0011458_NTC_999
  gRNA
ttttggcgacgcatcgctgg

SEQ ID NO: 140680 - DNA, 20 bp, Artificial Sequence
  mmSKRIPTE0011459_NTC_1000
  gRNA
tttttagacctaattcgcgc

SEQ ID NO: 140681 - DNA, 18 bp, Artificial Sequence
  5 prime adaptor for sgRNA library construction
ggaaaggacgaaacaccg

SEQ ID NO: 140682 - DNA, 34 bp, Artificial Sequence
  3 prime adaptor for sgRNA library construction
gttttagagctagaaatagcagttaaaataaggc

SEQ ID NO: 140683 - protein, 60 aa, Macropus
EIQEARLKLPILSEEQVIMEAVAENPTVIICGETGSGKTTQVPQFLYEAGYSSEEGLIGI

SEQ ID NO: 140684 - protein, 60 aa, Macropus
VFRPPPEGCRLCVVATNVAETSLTIPGVKYVVDCGKVKKRFYDKVTGVSSERVTWVSQAS

SEQ ID NO: 140685 - protein, 60 aa, Sus
EMQEERLKLPILASEQVIMEAVAEHPIVIVCGETGSGKTTQVPQFLYEAGYSREGGMVGP

SEQ ID NO: 140686 - protein, 57 aa, Sus
LWRRPPGICCAGCSGGALPGLSLAGLQHSVCTPPGSRSRTRGRGVKEISIAKVPGAS

SEQ ID NO: 140687 - protein, 60 aa, Tursiops
EMQAERLKLPILSEEQVIMEAVAEHPVVIVCGETGSGKTTQVPQFLYEAGYSSDNSIIGV

SEQ ID NO: 140688 - protein, 60 aa, Tursiops
VFQPPPEGTRLCVVATNVAETSLTIPGIKYVVDCGKVKKRYYDRVTGVSSERITWVSQAS

SEQ ID NO: 140689 - protein, 60 aa, Ornithorhynchus
EIQEARLKLPILSEEQVIMEAVTENPIVIICGETGSGKTTQVPQFLYEAGYASRDSIIGI

SEQ ID NO: 140690 - protein, 60 aa, Ornithorhynchus
VFKPPPEGTRLCVIATNVAETSLTIPNIKYVVDCGKVKKRFYDKVTGVSSERVSWTSQAS

SEQ ID NO: 140691 - protein, 59 aa, Monodelphis
EVQEARLRLPILSEEQVIMEAVSENPTVIVCGETGSGKTTQVPQFLYEAGYSSDGLIGI

SEQ ID NO: 140692 - protein, 60 aa, Monodelphis
VFRPPPEGRRLCVVATNVAETSLTIPGIKYVVDCGKVKKRFYDRVTGVSSFRVTWVSQAS

SEQ ID NO: 140693 - protein, 49 aa, Microcebus
  misc_feature (4)..(49): Xaa can be any naturally occurring amino acid
EMQXXXXXXXXXXXXXXXXXXXXXXXXXXXXXXXXXXXXXXXXXXXXXX

SEQ ID NO: 140694 - protein, 60 aa, Microcebus
VFKPPPEGTRLCVVATNVAETSLTIPGIKYVVDCGKVKKRYYDRVTGVSSFRVTWVSQAS

SEQ ID NO: 140695 - protein, 60 aa, Ochotona
EMQEERLKLPILSEEQVIMEAVAEHPIVIVCGETGSGKTTQVPQFLYEAGYSSDDSIIGV

SEQ ID NO: 140696 - protein, 59 aa, Ochotona
VFRPSEGARLCVVATNVAETSLTIPGIKYVVDCGKVKKRYYDRVTGVSSFRITWVSQAS

SEQ ID NO: 140697 - protein, 60 aa, Cavia
EMQAERLQLPILSEEQVIMEAVAEHPIVIVCGETGSGKTTQVPQFLYEAGYSSNNSIIGV

SEQ ID NO: 140698 - protein, 60 aa, Cavia
VFRPPEEGTRLCVVATNVAETSLTIPGIKYVVDCGKVKKRYYDRVTGVSSFRVTWVSQAS

SEQ ID NO: 140699 - protein, 58 aa, Dasypus
EMQEERLKLPILSEEQVIMEAVAEHPWSSCAETGEKTTQVPQFLYEAGYGSENSVIGV

SEQ ID NO: 140700 - protein, 53 aa, Dasypus
VFRPPPEGTRLCVVATNVAETSLTIPGIKYVDNSHTIQLSHINCPAQWTSQSP

SEQ ID NO: 140701 - protein, 60 aa, Dipodomys
EMQEERLKLPILSEEQTIMEAVAEHPVVIVCGETGSGKTTQVPQFLYEAGYSSDQSIIGV

SEQ ID NO: 140702 - protein, 60 aa, Dipodomys
VFRPPPEGARLCVVATNVAETSLTIPGIKYVVDCGKVKKRYYDRVTGVSSFRVTWISQAS

SEQ ID NO: 140703 - protein, 60 aa, Rattus
EMQEERLKLPILAEEQAIMEAVAEHPIVIVCGETGSGKTTQVPQFLYEAGYSSEDSIIGV

SEQ ID NO: 140704 - protein, 60 aa, Rattus
VFKPPPEGTRLCVIATNVAETSLTIPGIKYVVDCGKVKKRYYDRVTGVSSFRVTWVSQAS

SEQ ID NO: 140705 - protein, 60 aa, Mus; identical to SEQ ID NO: 140703

SEQ ID NO: 140706 - protein, 60 aa, Mus; identical to SEQ ID NO: 140694

SEQ ID NO: 140707 - protein, 60 aa, Procavia
EMQEERLKLPILAEEQVIMEAVAENPIVIVCGETGSGKTTQVPQFLYEAGYSSDGSYIGV

SEQ ID NO: 140708 - protein, 60 aa, Procavia
VFAPPPEGTRLCVVATNVAETSLTIPGIKYVVDCGKVKKRYYDRVTSVSSFRVTWISQAS

SEQ ID NO: 140709 - protein, 60 aa, Bos
EMQEERLKLPILSEEQVIMEAVAEHPIVIICGETGSGKTTQVPQFLYEAGYSSDNSVIGV

SEQ ID NO: 140710 - protein, 60 aa, Bos
VFQPPPEGTRLCVVATNVAETSLTIPGIKYVVDCGKVKKRHYDRVTGVSSFRVTWVSQAS

SEQ ID NO: 140711 - protein, 60 aa, Pteropus
EMQEERLKLPILSEEQVIMEAVAEHPVVIVCGETGSGKTTQVPQFLYEAGYSSDDSIIGV

SEQ ID NO: 140712 - protein, 60 aa, Pteropus
VFQPPPEGTRLCVVATNVAETSLTIPGIKYVVDCGKVKKRHYDRVTGVSSFRITWVSQAS

SEQ ID NO: 140713 - protein, 60 aa, Felis
EGQEERLKLPILAEEQVIMEAVAEHPIVIVCGETGSGKTTQVPQFLYEAGYTSDDSIIGI

SEQ ID NO: 140714 - protein, 60 aa, Felis
VFQPPPEGTRLCVVATNVAETSLTIPGIKYVVDCGKVKRRHYDRVTGVSSFRVTWVSQAS

SEQ ID NO: 140715 - protein, 60 aa, Mustela
EMQEERLKLPILAEEQAIMEAVAEHPIVIVCGETGSGKTTQVPQFLYEAGYSSDNSIIGI

SEQ ID NO: 140716 - protein, 60 aa, Mustela; identical to SEQ ID NO: 140710

SEQ ID NO: 140717 - protein, 60 aa, Canis
EMQEERLKLPILAEEQVIMEAVAEHPIVIVCGETGSGKTTQVPQFLYEAGYSSDNSIIGI

SEQ ID NO: 140718 - protein, 60 aa, Canis; identical to SEQ ID NO: 140710

SEQ ID NO: 140719 - protein, 60 aa, Ailuropoda; identical to SEQ ID NO: 140717

SEQ ID NO: 140720 - protein, 60 aa, Ailuropoda; identical to SEQ ID NO: 140710

SEQ ID NO: 140721 - protein, 60 aa, Equus
EMQEERLKLPILSEEQVIMEAVAEHPIVIVCGETGSGKTTQVPQFLYEAGYSSDNSIIGV

SEQ ID NO: 140722 - protein, 60 aa, Equus
VFKPPPEGTRLCVVATNVAETSLTIPGIKYVVDCGKVKKRHYDRVTGVSSFRVTWVSQAS

SEQ ID NO: 140723 - protein, 60 aa, Ictidomys
EMQEERLKLPILAEEQVIMEAVADNPIVIVCGETGSGKTTQVPQFLYEAGYSSDDSIIGV

SEQ ID NO: 140724 - protein, 60 aa, Ictidomys
VFRPPPEGTRLCVVATNVAETSLTIPGIKYVVDCGKVKKRFYDRVTGVSSFRVTWVSQAS

SEQ ID NO: 140725 - protein, 60 aa, Oryctolagus
EMQEERLKLPILSEEQVIMEAVAEHPIVIVCGETGSGKTTQVPQFLYEAGYSSDDGIIGV

SEQ ID NO: 140726 - protein, 59 aa, Oryctolagus
VFRPPPEGTRLCVVATHVAETSLTIPGIKYVVDCKVKKRYYDRVTGVSSFRVTWISQAS

SEQ ID NO: 140727 - protein, 60 aa, Loxodonta
EMQEERLKLPILAEEQVIMEAVAENPIIIVCGETGSGKTTQVPQFLYEAGYSSDDSIIGV

SEQ ID NO: 140728 - protein, 60 aa, Loxodonta
VFTPPPEGTRLCVVATNVAETSLTIPGIKYVVDCGKVKKRYYDRVTSVSSFRVTWVSQAS

SEQ ID NO: 140729 - protein, 60 aa, Otolemur
EIQEERLKLPILSEEQVIMEAVAEHPVVIVCGETGSGKTTQVPQFLYEAGYSSDNSIIGV

SEQ ID NO: 140730 - protein, 60 aa, Otolemur; identical to SEQ ID NO: 140704

SEQ ID NO: 140731 - protein, 60 aa, Nomascus
EMQEERLKLPILSEEQVIMEAVAEHPIVIVCGETGSGKTTQVPQFLYEAGYSSEDSIIGV

SEQ ID NO: 140732 - protein, 60 aa, Nomascus
VFKPPPEGIRLCVVATNVAETSLTIPGIKYVVDCGKVKKRYYDRVTGVSSFRVTWVSQAS

SEQ ID NO: 140733 - protein, 60 aa, Callithrix
EMQEERLKLPILAEEQVIMEAVAEHPIIIVCGETGSGKTTQVPQFLYEAGYSSEGSIIGV

SEQ ID NO: 140734 - protein, 60 aa, Callithrix
VFKPPPEGTRLCVVATNVAETSLTIPGIKYVVDCGKVKKRDYDRVTGVSSFRVTWVSQAS

SEQ ID NO: 140735 - protein, 60 aa, Macaca; identical to SEQ ID NO: 140731

SEQ ID NO: 140736 - protein, 60 aa, Macaca; identical to SEQ ID NO: 140694

SEQ ID NO: 140737 - protein, 60 aa, Papio
EMQEERLKLPILSEEQVIMEAVTEHPIVIVCGETGSGKTTQVPQFLYEAGYSSEGSIIGV

SEQ ID NO: 140738 - protein, 60 aa, Papio; identical to SEQ ID NO: 140694

SEQ ID NO: 140739 - protein, 60 aa, Chlorocebus; identical to SEQ ID NO: 140731

SEQ ID NO: 140740 - protein, 60 aa, Chlorocebus
VFKPPPEGTRLCVVATNVAETSLTIPGIKYVVDCGKVKKRYYDRVTGVSSFCVTWVSQAS

SEQ ID NO: 140741 - protein, 52 aa, Pongo
EMQEERLKLPILSEEQVIMEAVAEHPIVIVCGETGSGKTTQVPQFLYEAGYS

SEQ ID NO: 140742 - protein, 60 aa, Pongo; identical to SEQ ID NO: 140694

SEQ ID NO: 140743 - protein, 59 aa, Gorilla
EMQEERLKLPILSEEQVIMEAVAEHPIVIVCGETGSGKTTQVQFLYEAGFSSEDSIIGV

SEQ ID NO: 140744 - protein, 60 aa, Gorilla
VFKPPPEGTRLCVVATNVAETSLTIPGIKYVVDCGKVKKRYYDRVTGVSSFRYTWVSQAS

SEQ ID NO: 140745 - protein, 60 aa, Homo
EMQEERLKLPILSEEQVIMEAVAEHPIVIVCGETGSGKTTQVPQFLYEAGFSSEDSIIGV

SEQ ID NO: 140746 - protein, 60 aa, Homo
VFKPPPEGTRLCVVATNVEATSLTIPGIKYVVDCGKVKKRYYDRVTGVSSFRVTWVSQAS

SEQ ID NO: 140747 - protein, 60 aa, Procavia
IYWPNGLTLDYAERKLYWADAKLNFIHKSNLDGTNRQAVVKGSLPHPFALTLFEDTLYWT

SEQ ID NO: 140748 - protein, 60 aa, Procavia
RVVLVNTSLGWPNGLALDYDEGKIYWGDAKTDKIEVMSTDGTGRRVLVEDKIPHIFGFTL

SEQ ID NO: 140749 - protein, 60 aa, Macropus
IYWPNGLTLDYEEEKLYWADAKLNFIHKSNLDGTNRQAVVRGSLPHPFALTLFEDTLYWT

SEQ ID NO: 140750 - protein, 58 aa, Macropus
RVVLVNTSLGWPNGLALDYDEDKIYWGDAKTDKIEVMKADGSGKVFVEDKFAQKFLIL

SEQ ID NO: 140751 - protein, 60 aa, Erinaceus
  misc_feature (1)..(36): Xaa can be any naturally occurring amino acid
XXXXXXXXXXXXXXXXXXXXXXXXXXXXXXXXXXXXQAVVKGSLPHPFALTLFEDTLYWT

SEQ ID NO: 140752 - protein, 60 aa, Erinaceus
  misc_feature (36)..(60): Xaa can be any naturally occurring amino acid
RVVLVNTSLGWPNGLALDYDEGKIYWGDAKTDKIEXXXXXXXXXXXXXXXXXXXXXXXXX

SEQ ID NO: 140753 - protein, 60 aa, Ochotona; identical to SEQ ID NO: 140751
  misc_feature (1)..(36): Xaa can be any naturally occurring amino acid

SEQ ID NO: 140754 - protein, 60 aa, Ochotona
RVVLVNTSLGWPNGLALDYDEGKIYWGDAKTDKIEVMNTDGTARRVLVEDKIPHIFGFTL

SEQ ID NO: 140755 - protein, 60 aa, Microcebus
IYWPNGLTLDYEERKLYWADAKLNFIHKSNLDGTNRQAVVKGSLPHPFALTLFEDTLYWT

SEQ ID NO: 140756 - protein, 60 aa, Microcebus; identical to SEQ ID NO: 140752
  misc_feature (36)..(60): Xaa can be any naturally occurring amino acid

SEQ ID NO: 140757 - protein, 60 aa, Vicugna; identical to SEQ ID NO: 140751
  misc_feature (1)..(36): Xaa can be any naturally occurring amino acid

SEQ ID NO: 140758 - protein, 60 aa, Vicugna
RVVLVNTSLGWPNGLALDYDEGKIYWGDAKTDKIEVMNTDGTGRRVLVEDKIPHIFGFTL

SEQ ID NO: 140759 - protein, 60 aa, Choloepus
IYWPNGLTLDYEEQKLYWADAKLNFIHKSNLDGTNRQAVVKGSLPHPFALTLFEDTLYWT

SEQ ID NO: 140760 - protein, 60 aa, Choloepus
  misc_feature (36)..(60): Xaa can be any naturally occurring amino acid
RVVLVNASLGWPNGLALDYDEGKIYWGDAKTDKIEXXXXXXXXXXXXXXXXXXXXXXXXX

SEQ ID NO: 140761 - protein, 60 aa, Echinops
IYWPNGLTVDYEEQKLYWADAKLNFIHKANVDGTNRQAVVKGSLPHPFALTLFEDTLYWT

SEQ ID NO: 140762 - protein, 60 aa, Echinops
RVVLVNTSLGWPNGLALDYDEMKIYWGDAKTDKIEVINTDGSGRRVLVEDKIPHIFGFTL

SEQ ID NO: 140763 - protein, 59 aa, Tarsius
  misc_feature (1)..(35): Xaa can be any naturally occurring amino acid
XXXXXXXXXXXXXXXXXXXXXXXXXXXXXXXXXXXQAVVKGSLPHPFALTLFEDTLYWT

SEQ ID NO: 140764 - protein, 60 aa, Tarsius; identical to SEQ ID NO: 140758

SEQ ID NO: 140765 - protein, 60 aa, Sorex; identical to SEQ ID NO: 140755

SEQ ID NO: 140766 - protein, 60 aa, Sorex; identical to SEQ ID NO: 140758

SEQ ID NO: 140767 - protein, 60 aa, Pteropus; identical to SEQ ID NO: 140759

SEQ ID NO: 140768 - protein, 60 aa, Pteropus; identical to SEQ ID NO: 140758

SEQ ID NO: 140769 - protein, 60 aa, Tupaia; identical to SEQ ID NO: 140755

SEQ ID NO: 140770 - protein, 60 aa, Tupaia
RIVLVNTSLGWPNGLALDYDEGKIYWGDAKTDKIEVMNTDGTGRRVLVEDKIPHIFGFTL

SEQ ID NO: 140771 - protein, 60 aa, Ornithorhynchus
IYWPNGLTLDYKERKLYWADAKLNFIHKSNLDGTDRQAVVKGSLPHPFALTLFEDTLYWT

SEQ ID NO: 140772 - protein, 60 aa, Ornithorhynchus
RTVLVNTSLGWPNGLALDYDEGKIYWGDAKTDKIEVMNADGSGRRVLVEDKIPHIFGFTL

SEQ ID NO: 140773 - protein, 60 aa, Monodelphis; identical to SEQ ID NO: 140749

SEQ ID NO: 140774 - protein, 60 aa, Monodelphis
RVVLVNTSLGWPNGLALDYDEDKIYWGDAKTDKIEVMNADGTGRRVLVEDKIPHIFGFTL

SEQ ID NO: 140775 - protein, 60 aa, Sarcophilus; identical to SEQ ID NO: 140749

SEQ ID NO: 140776 - protein, 60 aa, Sarcophilus
RVVLVNTSLGWPNGLALDYDEEKIYWGDAKTDKIEVMNADGTGRRVLVEDKIPHIFGFTL

SEQ ID NO: 140777 - protein, 60 aa, Tursiops
IYWPNGLTLDYKERKLYWADAKLNFIHRSNLDGTNRQAVVKGSLPHPFALTLFEDTLYWT

SEQ ID NO: 140778 - protein, 60 aa, Tursiops; identical to SEQ ID NO: 140758

SEQ ID NO: 140779 - protein, 60 aa, Mus
IYWPNGLTLDYQERKLYWADAKLNFIHKSNLDGTNRQAVVKGSLPHPFALTLFEDTLYWT

SEQ ID NO: 140780 - protein, 60 aa, Mus
RVVLVNTSLGWPNGLALDYDEGTIYWGDAKTDKIEVMNTDGTGRRVLVEDKIPHIFGFTL

SEQ ID NO: 140781 - protein, 60 aa, Rattus; identical to SEQ ID NO: 140755

SEQ ID NO: 140782 - protein, 60 aa, Rattus; identical to SEQ ID NO: 140780

SEQ ID NO: 140783 - protein, 60 aa, Callithrix; identical to SEQ ID NO: 140755

SEQ ID NO: 140784 - protein, 60 aa, Callithrix
RVVLVNTSLGWPNGLALDYDEGKVYWGDAKTDKIEVVNTDGSGRRVLVEDKIPHIFGFTL

SEQ ID NO: 140785 - protein, 59 aa, Ovis
IYWPNGLTLDYEERKLYWADAKLNFIHRSNLDGTRQAVVKGSLPHPFALTLFEDTLYWT

SEQ ID NO: 140786 - protein, 60 aa, Ovis; identical to SEQ ID NO: 140758

SEQ ID NO: 140787 - protein, 60 aa, Bos
IYWPNGLTLDYEERKLYWADAKLNFIHRSNLDGTTRQAVVKGSLPHPFALTLFEDTLYWT

SEQ ID NO: 140788 - protein, 60 aa, Bos; identical to SEQ ID NO: 140758

SEQ ID NO: 140789 - protein, 60 aa, Chlorocebus
IYWPNGLTLDYEEQKLYWADAKLNFIHKSNLDGTNRQAVVKGSLPHPFALTLFEDILYWT

SEQ ID NO: 140790 - protein, 60 aa, Chlorocebus; identical to SEQ ID NO: 140758

SEQ ID NO: 140791 - protein, 60 aa, Macaca; identical to SEQ ID NO: 140789

SEQ ID NO: 140792 - protein, 60 aa, Macaca; identical to SEQ ID NO: 140758

SEQ ID NO: 140793 - protein, 60 aa, Papio; identical to SEQ ID NO: 140789

SEQ ID NO: 140794 - protein, 60 aa, Papio; identical to SEQ ID NO: 140758

SEQ ID NO: 140795 - protein, 60 aa, Homo; identical to SEQ ID NO: 140789

SEQ ID NO: 140796 - protein, 60 aa, Homo; identical to SEQ ID NO: 140758

SEQ ID NO: 140797 - protein, 60 aa, Nomascus; identical to SEQ ID NO: 140789

SEQ ID NO: 140798 - protein, 60 aa, Nomascus
RVILVNTSLGWPNGLALDYDEGKIYWGDAKTDKIEVMNTDGTGRRVLVEDKIPHIFGFTL

SEQ ID NO: 140799 - protein, 60 aa, Gorilla; identical to SEQ ID NO: 140789

SEQ ID NO: 140800 - protein, 60 aa, Gorilla; identical to SEQ ID NO: 140758

SEQ ID NO: 140801 - protein, 60 aa, Pan; identical to SEQ ID NO: 140789

SEQ ID NO: 140802 - protein, 60 aa, Pan; identical to SEQ ID NO: 140758

SEQ ID NO: 140803 - protein, 60 aa, Dasypus; identical to SEQ ID NO: 140755

SEQ ID NO: 140804 - protein, 60 aa, Dasypus; identical to SEQ ID NO: 140758

SEQ ID NO: 140805 - protein, 60 aa, Otolemur; identical to SEQ ID NO: 140755

SEQ ID NO: 140806 - protein, 60 aa, Otolemur
RVVLVNTSLGWPNGLALDYEESKIYWGDAKTDKIEVMNTDGTGRRVLVEDKIPHIFGFTL

SEQ ID NO: 140807 - protein, 60 aa, Myotis
IYWPNGLTLDYEERKLYWADAKLNFIHKSNLDGTDRQAVVKGSLPHPFALTLFEDTLYWT

SEQ ID NO: 140808 - protein, 60 aa, Myotis; identical to SEQ ID NO: 140758

SEQ ID NO: 140809 - protein, 60 aa, Loxodonta; identical to SEQ ID NO: 140755

SEQ ID NO: 140810 - protein, 60 aa, Loxodonta; identical to SEQ ID NO: 140758

SEQ ID NO: 140811 - protein, 60 aa, Sus; identical to SEQ ID NO: 140755

SEQ ID NO: 140812 - protein, 60 aa, Sus; identical to SEQ ID NO: 140758

SEQ ID NO: 140813 - protein, 60 aa, Oryctolagus; identical to SEQ ID NO: 140755

SEQ ID NO: 140814 - protein, 60 aa, Oryctolagus; identical to SEQ ID NO: 140758

SEQ ID NO: 140815 - protein, 60 aa, Cavia; identical to SEQ ID NO: 140755

SEQ ID NO: 140816 - protein, 60 aa, Cavia; identical to SEQ ID NO: 140758

SEQ ID NO: 140817 - protein, 60 aa, Equus; identical to SEQ ID NO: 140755

SEQ ID NO: 140818 - protein, 60 aa, Equus; identical to SEQ ID NO: 140758

SEQ ID NO: 140819 - protein, 60 aa, Felis; identical to SEQ ID NO: 140759

SEQ ID NO: 140820 - protein, 60 aa, Felis
RVVLVNTSLGWPNGLALDYDEGKIYWGDAKTDKIEVMNIDGTGRRVLVEDKIPHIFGFTL

SEQ ID NO: 140821 - protein, 60 aa, Canis; identical to SEQ ID NO: 140759

SEQ ID NO: 140822 - protein, 60 aa, Canis; identical to SEQ ID NO: 140758

SEQ ID NO: 140823 - protein, 60 aa, Mustela; identical to SEQ ID NO: 140759

SEQ ID NO: 140824 - protein, 60 aa, Mustela; identical to SEQ ID NO: 140758

SEQ ID NO: 140825 - protein, 60 aa, Ailuropoda; identical to SEQ ID NO: 140759

SEQ ID NO: 140826 - protein, 60 aa, Ailuropoda; identical to SEQ ID NO: 140758

SEQ ID NO: 140827 - protein, 60 aa, Erinaceus
TAKACAQTVLAVLHYEEAKSFLWWASNLMVLGGSFAYTWVRGWEMKRVQEEPGPREDQKS

SEQ ID NO: 140828 - protein, 60 aa, Monodelphis
TAKACAQTVLAVLYFNETKSFLWWTSNLMVLGGSSAYTWVKGLEMKKAQGEPSPKEGEKS

SEQ ID NO: 140829 - protein, 60 aa, Sarcophilus
TAKACAQTVLAVLYFEETKSFLWWTSNLMVLGGSSAYTWVKGLEMKKAQEELAPREGEKG

SEQ ID NO: 140830 - protein, 60 aa, Tursiops
TAKACAQTVLAVLYYEETKSFLWWMSNMMVLGGSSAYTWVRGWEMKKIQEEPRPKEDEKS

SEQ ID NO: 140831 - protein, 45 aa, Echinops
TAKACAQTVLAVMMVLGGSWAYTCVRGWEMKKVQEEPSPKEDEKS

SEQ ID NO: 140832 - protein, 60 aa, Ornithorhynchus
TAKACAQTVLAVLSYEETKSFLWWTSNMMVLGGSSAYTWVKGLEMKKAQEEPGPKAGEKG

SEQ ID NO: 140833 - protein, 60 aa, Rattus
TAKACAQTVLAVLYYEEIKSFLWWTSNLMVLGGSSAYTWVRGWEMQKTQEDPSSKEGEKS

SEQ ID NO: 140834 - protein, 60 aa, Mus
TAKACAQTVLAVLYYEEIKSFLWWTSNLMVLGGSSAYTWVRGWEMQKTQEDPSSKDGEKS

SEQ ID NO: 140835 - protein, 60 aa, Dasypus
TAKACAQTVLAVLYFEETKSLLWWTSNMMVLGGSSTYTWVRGWEMKKVQEEPSPREDEKN

SEQ ID NO: 140836 - protein, 60 aa, Ovis
TAKACAQTVLAVLYYEEAKSFLWWTSNMMVLGGSSAYTWVRGREMKKTQEEPHPRENEKS

SEQ ID NO: 140837 - protein, 60 aa, Bos; identical to SEQ ID NO: 140836

SEQ ID NO: 140838 - protein, 60 aa, Otolemur
TAKACAQTVLAVLYYEETKSFLWWTSNMMVLGGSSAYTWVRGWEMKKTQEEPSPKEDEKS

SEQ ID NO: 140839 - protein, 60 aa, Microcebus
TAKACAQTVLAVLYYEETKSFLWWTSNMMVLGGSSAYTWVRGWEMKKTQEEPSPKEGEKS

SEQ ID NO: 140840 - protein, 60 aa, Loxodonta
TAKACAQTVLAVLYYEETKSFLWWTSNMMVLGGSSAYTWVRGWEMKKVQEEPSPKEGEKS

SEQ ID NO: 140841 - protein, 60 aa, Procavia
TAKACAQTVLAVLYYEETKSFLWWTSNMMVLGGSSAYTWVRGWEMKKLQEEPSPRESEKI

SEQ ID NO: 140842 - protein, 60 aa, Dipodomys
TAKACAQTVLAVLYYEETKSFLWWTSNLMVLGGSSAYTWVRGWEMKKTPEDPSPKEGEKS

SEQ ID NO: 140843 - protein, 59 aa, Ictidomys
TAKACAQTVLAVLYFEETKSFLWWTSNAMVLGGSSAYTWVRGWEMKSQEDPGPREGEKS

SEQ ID NO: 140844 - protein, 60 aa, Ochotona
TAKACAQTVLAVLYYEETKSFLWWTSNLMVLGGSSAYTWVRGWEMQKVQHDPSPKENEKS

SEQ ID NO: 140845 - protein, 59 aa, Oryctolagus
TAKACAQTVLAVLYYEEAKSFLWWTSNLMVLGGSSAYTWVRGWEKKEQEDPSPKEGDKS

SEQ ID NO: 140846 - protein, 60 aa, Cavia
TAKACFQTVLAVLYYEETKSFLWWTSNLMVLGGSSAYTWVRGWEMKKVQEDPSPREDEKS

SEQ ID NO: 140847 - protein, 60 aa, Pteropus
TAKACAQTVLAVLYYEETKSFLWWTSNMMVLGGSSAYTWVRGWEMKKIQEDPSPKEDEKS

SEQ ID NO: 140848 - protein, 60 aa, Canis; identical to SEQ ID NO: 140847

SEQ ID NO: 140849 - protein, 60 aa, Felis
TTKACAQTVLAVLYYEETKSFLWWTSNMMVLGGSSAYTWVRGWEMKKIQEEPSPKEDEKS

SEQ ID NO: 140850 - protein, 60 aa, Mustela
TAKACAQTVLAVLYYEETKSFLWWTSNMMVLGGSSAYTWVRGWEMKKIQEEPSPKEEEKS

SEQ ID NO: 140851 - protein, 60 aa, Ailuropoda
TAKACAQTVLAVLYYEETKSFLWWTSNLMVLGGSSAYTWVRGWEMKKIQEEPSPKEEEKS

SEQ ID NO: 140852 - protein, 60 aa, Myotis
TAKACAQTVLAVLYYEETKSFLWWTSNMMVLGGSSAYTWVRGWEMKKVQEEPSPKDNEKS

SEQ ID NO: 140853 - protein, 60 aa, Equus
TAKACAQTVLAVLYYEETKSFLWWTSNMMVLGGSSAYTWVRGWEMKKVQEEPSPKEEEKS

SEQ ID NO: 140854 - protein, 60 aa, Tarsius
TAKACAQTVLAVLYYEETKSFFWWMSNMMVLGGSSAYTWVRGWEMKKTQEEPSPKEDEKS

SEQ ID NO: 140855 - protein, 60 aa, Chlorocebus
TAKACAQTVLAVLYYEEAKSFLWWTSNMMVLGGSSAYTWVRGWEMKKIPEEPSPKEGEKS

SEQ ID NO: 140856 - protein, 60 aa, Macaca; identical to SEQ ID NO: 140855

SEQ ID NO: 140857 - protein, 60 aa, Papio; identical to SEQ ID NO: 140855

SEQ ID NO: 140858 - protein, 60 aa, Callithrix
TAKACAQTVLAVLYYEETKSFLWWTSNMMVLGGSSAYTWVRGREMKKTPEELSPKEGEKS

SEQ ID NO: 140859 - protein, 60 aa, Gorilla
TAKACAQTVLAVLYYEETKSFLWWTSNMMVLGGSSAYTWVRGWEMKKTPEEPSPKDSEKS

SEQ ID NO: 140860 - protein, 60 aa, Pan
TAKACAQTVLAVLYYEETKSFLWWTSNMMVLGGSSAYTWVRGWEMKKSPEEPSPKDSEKS

SEQ ID NO: 140861 - protein, 60 aa, Homo; identical to SEQ ID NO: 140859

SEQ ID NO: 140862 - protein, 60 aa, Pongo
TAKACAQTVLAVLYYEETKSFLWWTSNMMVLGGSSAYTWVRGWEMKKTPEEPSPKEGEKS

SEQ ID NO: 140863 - protein, 60 aa, Nomascus; identical to SEQ ID NO: 140839

SEQ ID NO: 140864 - DNA, 38 bp, Mus musculus
ctaacctcatagctgttaggaattctcacgtgaagaag

SEQ ID NO: 140865 - DNA, 39 bp, Mus musculus
ctaacctcataagctgttaggaattctcacgtgaagaag

SEQ ID NO: 140866 - DNA, 31 bp, Mus musculus
ctaacctcataggaattctcacgtgaagaag

SEQ ID NO: 140867 - DNA, 37 bp, Mus musculus
ctaacctcatactgttaggaattctcacgtgaagaag

SEQ ID NO: 140868 - DNA, 36 bp, Mus musculus
ctaacctcatatgttaggaattctcacgtgaagaag

SEQ ID NO: 140869 - DNA, 36 bp, Mus musculus
ctaacctcagctgttaggaattctcacgtgaagaag

SEQ ID NO: 140870 - DNA, 37 bp, Mus musculus
ctaacctcatgctgttaggaattctcacgtgaagaag

SEQ ID NO: 140871 - DNA, 34 bp, Mus musculus
ctaacctcatattaggaattctcacgtgaagaag

SEQ ID NO: 140872 - DNA, 35 bp, Mus musculus
ctaacctcatagttaggaattctcacgtgaagaag

SEQ ID NO: 140873 - DNA, 37 bp, Mus musculus
ctaacctcaagctgttaggaattctcacgtgaagaag

SEQ ID NO: 140874 - DNA, 33 bp, Mus musculus
ctaacctcatataggaattctcacgtgaagaag

SEQ ID NO: 140875 - DNA, 40 bp, Mus musculus
cagtcgcggtcgcttcagtcgtcagcatggctcgctcggt

SEQ ID NO: 140876 - DNA, 41 bp, Mus musculus
cagtcgcggtcgcttcagtcagtcagcatggctcgctcggt

SEQ ID NO: 140877 - DNA, 38 bp, Mus musculus
cagtcgcggtcgcttcaggtcagcatggctcgctcggt

SEQ ID NO: 140878 - DNA, 40 bp, Mus musculus; identical to SEQ ID NO: 140875

SEQ ID NO: 140879 - DNA, 28 bp, Mus musculus
cagtcgcggtcgcttcagttcgctcggt

SEQ ID NO: 140880 - DNA, 39 bp, Mus musculus
cagtcgcggtcgcttcagtcgtagcatggctcgctcggt

SEQ ID NO: 140881 - DNA, 37 bp, Mus musculus
cagtcgcggtcgcttcagtcagcatggctcgctcggt

SEQ ID NO: 140882 - DNA, 37 bp, Mus musculus
cagtcgcggtcgcttcagtcgtcatggctcgctcggt

SEQ ID NO: 140883 - DNA, 36 bp, Mus musculus
cagtcgcggtcgcttcagtcgcatggctcgctcggt

SEQ ID NO: 140884 - DNA, 30 bp, Mus musculus
cagtcgcggtcgcttcatggctcgctcggt

SEQ ID NO: 140885 - DNA, 34 bp, Mus musculus
cagtcgcggtcgcttcaagcatggctcgctcggt

SEQ ID NO: 140886 - DNA, 40 bp, Mus musculus
cagggacaagttgcctacctatagcagtggcctggctctg

SEQ ID NO: 140887 - DNA, 38 bp, Mus musculus
cagggacaagttgcctacctatcagtggcctggctctg

SEQ ID NO: 140888 - DNA, 39 bp, Mus musculus
cagggacaagttgcctacctatagagtggcctggctctg

SEQ ID NO: 140889 - DNA, 39 bp, Mus musculus
cagggacaagttgcctacctatacagtggcctggctctg

SEQ ID NO: 140890 - DNA, 37 bp, Mus musculus
cagggacaagttgcctacctatagtggcctggctctg

SEQ ID NO: 140891 - DNA, 37 bp, Mus musculus
cagggacaagttgcctacctacagtggcctggctctg

SEQ ID NO: 140892 - DNA, 41 bp, Mus musculus
cagggacaagttgcctacctatagtcagtggcctggctctg

SEQ ID NO: 140893 - DNA, 36 bp, Mus musculus
cagggacaagttgcctacctcagtggcctggctctg

SEQ ID NO: 140894 - DNA, 41 bp, Mus musculus
cagggacaagttgcctacctatagccagtggcctggctctg

SEQ ID NO: 140895 - DNA, 35 bp, Mus musculus
cagggacaagttgcctacccagtggcctggctctg

SEQ ID NO: 140896 - DNA, 23 bp, Mus musculus
cagggacaagttgcctggctctg
